(19) United States
(12) Patent Application Publication
(10) Pub. No.: US 2021/0269789 A1
(43) Pub. Date: Sep. 2, 2021

(54) ENGINEERED BRANCHED CHAIN KETOACID DECARBOXYLASES

(71) Applicant: Codexis, Inc., Redwood City, CA (US)

(72) Inventors: Xiang Yi, San Carlos, CA (US); Nikki Dellas, San Carlos, CA (US); James Nicholas Riggins, San Francisco, CA (US); Chinping Chng, Menlo Park, CA (US); Nicholas J. Agard, San Francisco, CA (US); Kristen Jean Vallieu, Union City, CA (US); Gjalt W. Huisman, Redwood City, CA (US)

(21) Appl. No.: 17/255,217

(22) PCT Filed: Jun. 27, 2019
(86) PCT No.: PCT/US19/39401

§ 371 Date: Dec. 22, 2020

Related U.S. Application Data
(60) Provisional application No. 62/694,597, filed on Jul. 6, 2018.

(51) Int. Cl. C12N 9/88

(52) U.S. Cl. CPC C12N 9/88; A61K 38/00; C12Y 401/01072

(57) ABSTRACT

The present invention provides engineered branched chain ketoacid decarboxylase (KdcA) polypeptides and compositions thereof, as well as polynucleotides encoding the engineered branched chain ketoacid decarboxylase (KdcA) polypeptides. In some embodiments, the engineered KdcA polypeptides are optimized to provide enhanced catalytic activity, as well as reduced sensitivity to proteolysis and increased tolerance to storage at elevated temperatures. The present invention also provides methods for the use of the compositions comprising the engineered KdcA polypeptides for therapeutic and industrial purposes.

[0001] The present application claims priority to U.S. Prov. Pat. Appln. Ser. No. 62/694,597, filed Jul. 6, 2018, which is hereby incorporated by reference in its entirety for all purposes.

### FIELD OF THE INVENTION

[0002] The present invention provides engineered branched chain ketoacid decarboxylase (KdcA) polypeptides and compositions thereof, as well as polynucleotides encoding the engineered branched chain ketoacid decarboxylase (KdcA) polypeptides. In some embodiments, the engineered KdcA polypeptides are optimized to provide enhanced catalytic activity, as well as improved serum stability. The invention also relates to the use of the compositions comprising the engineered KdcA polypeptides for therapeutic and industrial purposes.

### REFERENCE TO A “SEQUENCE LISTING,” A TABLE, OR A COMPUTER PROGRAM LISTING APPENDIX SUBMITTED AS AN ASCII TEXT FILE

[0003] The Sequence Listing written in file CX7-170W02_ST25.txt, created on Jun. 26, 2019, with a size of 1,830,912 bytes, machine format IBM-PC, MS-Windows operating system, is hereby incorporated by reference.

### BACKGROUND OF THE INVENTION

[0004] Maple syrup urine disease (MSUD), also referred to as “branched chain ketoaciduria,” branched chain alpha-ketoacid dehydrogenase deficiency,” and “BCKD deficiency,” is a rare inherited aminoacidopathy secondary to dysfunction in the branched chain keto acid dehydrogenase (BCKDH) complex that is involved in the catabolic pathway of leucine, isoleucine and valine (i.e., branched chain amino acids). It was first described in 1954 by Menkes et al. (Menkes et al., Pediatrics 14:462-467 [1954]) and named due to the distinctive, sweet odor of the urine of affected newborns. It is also characterized by poor feeding, vomiting, lethargy, abnormal movements (e.g., hyper or hypotonia), and delayed development. Without treatment, the disease can progress to encephalopathy, seizures, coma, permanent neurologic damage, and death. Later in life, developmental delays, learning problems, seizures, and motor difficulties are common. There are four common forms that are classified based on the signs and symptoms of disease. The most common and severe type is the “classic” type, which becomes apparent within two weeks after birth. The other types are intermediate MSUD, intermittent MSUD, and thiamine-responsive MSUD. In the classic form, the disease becomes apparent after the newborn has ingested milk containing protein. This results in an increase in isoleucine, leucine, and valine in the body, which becomes toxic to the brain. In the intermittent form, brain damage occurs during times of physical stress (e.g., infection, fever or not eating for a prolonged period), which leads to metabolic decompensation.

[0005] Diagnostic testing for MSUD in newborns includes blood and urine amino acid tests to determine the leucine, isoleucine, alloioleucine, and valine concentrations in these fluids. If MSUD is identified, there will be signs of ketosis and acidosis. Upon diagnosis and during symptomatic episodes, treatment involves eating a protein-free diet and correction of the metabolic consequences associated with the elevated amino acid levels. Use of a special intravenous solution decreases the leucine level (the most toxic) and corrects energy deficits.

[0006] Current treatment involves dietary restriction of branched-chain amino acids (BCAAs). Deficient levels of BCKDH complex enzymes results in toxic accretion of BCAAs and their related metabolites in the cerebrospinal fluid, blood, and tissues. Without treatment or constant attentive care, this leads to numerous and serious side effects (e.g., neurological dysfunction, seizures, and infant death). Although some BCAA turnover via renal clearance (resulting in the typical sweet, maple syrup smell of affected patients' urine), it is not sufficient to provide relief from the accumulation of toxic amino acid levels in the body (See, Schadewalt and Wendel, Eur. J. Pediatr., 156(Suppl. 1): S62-66 [1997]; and Skvorak, J. Inherit. Metab. Dis., 32(2):229-46 [2009]).

### SUMMARY OF THE INVENTION

[0007] The present invention provides engineered branched chain ketoacid decarboxylase (KdcA) polypeptides and compositions thereof, as well as polynucleotides encoding the engineered branched chain ketoacid decarboxylase (KdcA) polypeptides. In some embodiments, the engineered KdcA polypeptides are optimized to provide enhanced catalytic activity, as well as improved serum stability. The invention also relates to the use of the compositions comprising the engineered KdcA polypeptides for therapeutic and industrial purposes. In some embodiments, the present invention is directed to engineered branched chain ketoacid decarboxylase (KdcA) polypeptides and biologically active fragments and analogs thereof having improved properties such an increased storage stability and/or reduced sensitivity to proteolysis.

[0008] The present invention is directed to engineered KdcA polypeptides and biologically active fragments and analogs thereof having improved properties when compared to a wild-type KdcA enzyme or a reference KdcA polypeptide under essentially the same conditions. The invention is further directed to methods of using the engineered KdcA polypeptides and biologically active fragments and analogs thereof in therapeutic and/or industrial compositions and methods of using such compositions for therapeutic and/or industrial purposes.

[0009] The present invention provides engineered ketoacid decarboxylase polypeptides comprising amino acid sequences having at least 85%, 86%, 87%, 88%, 89%, 90%, 91%, 92,%, 93%, 94%, 95%, 96%, 97%, 98%, 99%, or more sequence identity to at least one of SEQ ID NO:2, 46, and/or 58, wherein the amino acid positions of said amino acid sequences are numbered with reference to the amino acid sequence of SEQ ID NO: 2, 46, or 58. In some embodiments, the engineered ketoacid decarboxylase polypeptide sequence has at least 85%, 86%, 87%, 88%, 89%, 90%, 91%, 92%, 93%, 94%, 95%, 96%, 97%, 98%, 99%, or more sequence identity to SEQ ID NO:2, and wherein the polypeptide sequence of said engineered ketoacid decarboxylase polypeptide comprises at least one substitution or substitution set at one or more amino acid positions selected from 28, 37, 121/331, 124/442, 144/184, 153/264, 153/442, 174/453, 329, 355, 388, 419, 437, 442, 471, 500, and 510, wherein the amino acid positions are numbered with reference to SEQ ID NO: 2. In some additional embodiments, the polypeptide sequence of said engineered ketoacid decarboxylase polypeptide comprises at least one substitution or substitution set selected from 28F, 37A, 121L/331S, 124E/442A, 144P/184N, 153A/264E, 153A/442A, 174D/453T, 329K, 355L, 388P, 419D, 437S, 442A, 471P, 500I, and 510F, wherein the amino acid positions are numbered with reference to SEQ ID NO: 2. In some additional embodiments, the polypeptide sequence of said engineered ketoacid decarboxylase polypeptide comprises at least one substitution or substitution set selected from N28F, S37A, K121L/K331S, M124E/S442A, Y144P/S184N, L153A/1264E, L153A/S442A, E174D/I453T, E329K, S355L, F388P, K419D, Q437S, S442A, S471P, R500I, and K510F, wherein the amino acid positions are numbered with reference to SEQ ID NO: 2.

[0010] In some additional embodiments, the engineered ketoacid decarboxylase polypeptide sequence has at least 85%, 86%, 87%, 88%, 89%, 90%, 91%, 92%, 93%, 94%, 95%, 96%, 97%, 98%, 99%, or more sequence identity to SEQ ID NO: 2, and wherein the polypeptide sequence of said engineered ketoacid decarboxylase polypeptide comprises at least one substitution or substitution set at one or more amino acid positions selected from 37/144/187, 37/144/187/286/442, 37/144/442, 37/442, and 187/338/388/442, wherein the amino acid positions are numbered with reference to SEQ ID NO: 2. In some additional embodiments, the polypeptide sequence of said engineered ketoacid decarboxylase polypeptide comprises at least one substitution or substitution set selected from 37A/144T/187L, 37A/144T/187L/286I/442A, 37A/144T/442A, 37A/442A, and 187L/338E/388P/442A wherein the amino acid positions are numbered with reference to SEQ ID NO: 2. In some additional embodiments, the polypeptide sequence of said engineered ketoacid decarboxylase polypeptide comprises at least one substitution or substitution set selected from S37A/Y144T/T187L, S37A/Y144T/T187L/S286I/S442A, S37A/Y144T/S442A, S37A/S442A, and T187L/Q338E/F388P/S442A wherein the amino acid positions are numbered with reference to SEQ ID NO: 2.

[0011] In some additional embodiments, the engineered ketoacid decarboxylase polypeptide sequence has at least 85%, 86%, 87%, 88%, 89%, 90%, 91%, 92%, 93%, 94%, 95%, 96%, 97%, 98%, 99%, or more sequence identity to SEQ ID NO: 46, and wherein the polypeptide sequence of said engineered ketoacid decarboxylase polypeptide comprises at least one substitution or substitution set at one or more amino acid positions selected from 42/124/136/204/321/328/437/471/510, 42/124/136/204/437/471, 42/124/136/204/437/471/510, 42/124/136/331/437/471, 42/124/204/321/471, 42/124/204/471, 42/124/321/355/471, 42/136/204/321/328/331/355/471, 42/136/204/328/331/355/471, 42/136/328/331/471, 42/136/355/471/510, 42/204/321/328/342/355/471/510, 42/204/321/355/437/471/510, 42/204/328/342/437/471, 42/321/331/437/471, 42/321/437/471, 42/321/471, 42/328/471, 42/355/471/510, 42/471, 107/124/233/260/325/328/331/355/388/471, 107/124/233/355/446/471, 107/124/348/388/471, 107/124/471, 107/183/185/233/328/331/351/388/419/471, 107/183/233/260/328/348/351/388/471, 107/183/233/260/328/348/351/471, 107/183/233/260/331/348/351/419/471, 107/183/233/260/331/419/471, 107/183/260/328/348/351/471, 107/183/348/351/471, 107/185/233/328/351/388/471, 107/185/348/351/388/471, 107/233/260/328/331/351/471, 107/233/260/328/348/351/388/471, 107/233/348/471, 107/260/328/471, 107/325/328/348/388/471, 107/325/328/348/446/471, 107/325/331/446/471, 107/328/331/388/471, 107/328/331/471, 107/348/355/388/446/471, 107/348/388/471, 107/355/471, 107/388/471, 124/136/204/355/437/471, 124/136/321/355/471, 124/136/328/331/355/437/471/510, 124/136/331/471, 124/136/471, 124/260/331/355/446/471, 124/321/328/471/510, 124/321/331/342/471/510, 124/325/331/471, 124/325/471, 124/328/331/338/471, 124/331/338/342/355/471, 124/331/342/355/471, 124/338/342/471, 124/355/471, 136/204/328/331/355/437/471, 136/204/437/471, 136/321/471/510, 136/331/338/342/471, 136/437/471, 183/233/351/388/471, 185/233/260/328/331/419/471, 185/328/331/471, 185/471, 204/321/338/471, 233/325/328/331/348/355/471, 233/331/388/446/471, 260/325/331/446/471, 321/328/331/471, 325/328/331/348/355/388/471, 325/328/348/355/388/471, 325/331/388/471, 325/331/446/471, 328/331/355/471, 328/471, 338/342/355/471, 338/342/471, 338/342/471/510, 342/355/437/471, 342/355/471, 351/471, and 388/471, wherein the amino acid positions are numbered with reference to SEQ ID NO: 46. In some additional embodiments, the polypeptide sequence of said engineered ketoacid decarboxylase polypeptide comprises at least one substitution or substitution set selected from 42R/124R/136H/204W/321S/328L/437S/471P/510F, 42R/124R/136H/204W/437S/471P, 42R/124R/136H/204W/437S/471P/510F, 42R/124R/136H/331N/437S/471P, 42R/124R/204W/321S/471P, 42R/124R/204W/471P, 42R/124R/321S/355M/471P, 42R/136H/204W/321S/328L/331N/355L/471P, 42R/136H/204W/328L/331T/355L/471P, 42R/136H/328L/331T/471P, 42R/136H/355M/471P/510F, 42R/204W/321S/328L/342R/355L/471P/510F, 42R/204W/321S/355M/437S/471P/510F, 42R/204W/328L/342R/437S/471P, 42R/321S/331N/437S/471P, 42R/321S/437S/471P, 42R/321S/471P, 42R/328L/471P, 42R/355M/471P/510F, 42R/471P, 107R/124W/233H/260S/325F/328N/331L/355L/388P/471P, 107R/124W/233H/355L/446R/471P, 107R/124W/348D/388P/471P, 107R/124W/471P, 107R/183Y/185P/233R/328N/331L/351V/388P/419D/471P, 107R/183Y/233H/260S/328N/348D/351V/471P, 107R/183Y/233H/260S/331L/419D/471P, 107R/183Y/233R/260S/328N/348D/351V/388P/471P, 107R/183Y/233R/260S/331L/348D/351V/419D/471P, 1078/183Y/260S/328N/348D/351V/471P, 107R/183Y/348D/351V/471P, 1078/185P/233H/328N/351V/388P/471P, 107R/185P/348D/351V/388P/471P, 1078/233H/260S/328N/331L/351V/471P, 107R/233H/260S/328N/348D/351V/388P/471P, 107R/233H/348D/471P, 107R/260S/328N/471P, 107R/325F/328N/348D/388P/471P, 107R/325F/328N/348D/446R/471P, 107R/325F/331L/446R/471P, 107R/328N/331L/388P/471P, 107R/328N/331L/471P, 107R/348D/355L/388P/446R/471P, 107R/348D/388P/471P, 107R/355L/471P, 107R/388P/471P, 124R/136H/204W/355M/437S/471P, 124R/136H/321S/355L/471P, 124R/136H/328L/3311/355M/437S/471P/510F, 124R/136H/331N/471P, 124R/136H/471P, 124R/321S/328L/471P/510F, 124R/321S/331T/342R/471P/510F, 124R/328L/331T/338E/471P, 124R/331N/338E/342R/355L/471P, 124R/331T/342R/355L/471P, 124R/338E/342R/471P, 124R/355M/471P, 124W/260S/331L/355L/446R/471P, 124W/325F/331L/471P, 124W/325F/471P, 136H/204W/328L/331N/355M/437S/471P, 136H/204W/437S/471P, 136H/321S/471P/510F, 136H/331T/338E/342R/471P, 136H/437S/471P, 183Y/233H/351V/388P/471P, 185P/233H/260S/328N/331L/419D/471P, 185P/328N/331L/471P, 185P/471P, 204W/321S/338E/471P, 233H/325F/328N/331L/348D/355L/471P, 233H/331L/388P/446R/471P, 260S/325F/331L/446R/471P, 321S/328L/331T/471P, 325F/328N/331L/348D/355L/388P/471P, 325F/328N/348D/355L/388P/471P, 325F/331L/388P/471P, 325F/331L/446R/471P, 328L/331T/355M/471P, 328N/471P, 338E/342R/355L/471P, 338E/342R/471P, 338E/342R/471P/510F, 342R/355L/437S/471P, 342R/355M/471P, 351V/471P, and 388P/471P, wherein the amino acid positions are numbered with reference to SEQ ID NO: 46. In some additional embodiments, the polypeptide sequence of said engineered ketoacid decarboxylase polypeptide comprises at least one substitution or substitution set selected from K42R/M124R/L136H/N204W/R321S/S328L/Q437S/S471P/K510F, K42R/M124R/L136H/N204W/Q437S/S471P, K42R/M124R/L136H/N204W/Q437S/S471P/K510F, K42R/M124R/L136H/K331N/Q437S/S471P, K42R/M124R/N204W/R321S/S471P, K42R/M124R/N204W/S471P, K42R/M124R/R321S/S355M/S471P, K42R/L136H/N204W/R321S/S328L/K331N/S355L/5471P, K42R/L136H/N204W/S328L/K331T/S355L/S471P, K42R/L136H/S328L/K331T/S471P, K42R/L136H/S355M/S471P/K510F, K42R/N204W/R321S/S328L/K342R/S355L/S471P/K510F, K42R/N204W/R321S/S355M/Q437S/S471P/K510F, K42R/N204W/S328L/K342R/Q437S/S471P, K42R/R321S/K331N/Q437S/S471P, K42R/R321S/Q437S/S471P, K42R/R321S/S471P, K42R/S328L/S471P, K42R/S355M/S471P/K510F, K42R/S471P, D107R/M124W/K233H/K260S/5325F/S328N/K331L/5355L/F388P/5471P, D107R/M124W/K233H/5355L/K446R/5471P, D107R/M124W/1348D/F388P/S471P, D107R/M124W/S471P, D107R/E183Y/S185P/K233R/S328N/K331L/S351V/F388P/K419D/S471P, D107R/E183Y/K233H/K260S/S328N/1348D/5351V/5471P, D107R/E183Y/K233H/K260S/K331L/K419D/S471P, D107R/E183Y/K233R/K260S/S328N/1348D/S351V/F388P/S471P, D107R/E183Y/K233R/K260S/K331L/1348D/S351V/K419D/S471P, D107R/E183Y/K260S/S328N/1348D/S351V/S471P, D107R/E183Y/1348D/S351V/S471P, D107R/S185P/K233H/S328N/S351V/F388P/S471P, D107R/S185P/1348D/S351V/F388P/S471P, D107R/K233H/K260S/S328N/K331L/S351V/S471P, D107R/K233H/K260S/S328N/1348D/S351V/F388P/S471P, D107R/K233H/1348D/S471P, D107R/K260S/S328N/S471P, D107R/S325F/S328N/1348D/F388P/S471P, D107R/S325F/S328N/1348D/K446R/S471P, D107R/S325F/K331L/K446R/S471P, D107R/S328N/K331L/F388P/S471P, D107R/S328N/K331L/S471P, D107R/1348D/S355L/F388P/K446R/S471P, D107R/1348D/F388P/S471P, D107R/S355L/S471P, D107R/F388P/S471P, M124R/L136H/N204W/S355M/Q437S/S471P, M124R/L136H/R321S/S355L/S471P, M124R/L136H/S328L/K331T/S355M/Q437S/S471P/K510F, M124R/L136H/K331N/S471P, M124R/L136H/S471P, M124R/R321S/S328L/S471P/K510F, M124R/R321S/K331T/K342R/S471P/K510F, M124R/S328L/K331T/Q338E/S471P, M124R/K331N/Q338E/K342R/S355L/S471P, M124R/K331T/K342R/S355L/S471P, M124R/Q338E/K342R/S471P, M124R/S355M/S471P, M124W/K260S/K331L/S355L/K446R/S471P, M124W/S325F/K331L/S471P, M124W/S325F/S471P, L136H/N204W/S328L/K331N/S355M/Q437S/S471P, L136H/N204W/Q437S/S471P, L136H/R321S/S471P/K510F, L136H/K331T/Q338E/K342R/S471P, L136H/Q437S/S471P, E183Y/K233H/S351V/F388P/S471P, S185P/K233H/K260S/S328N/K331L/K419D/S471P, S185P/S328N/K331L/S471P, S185P/S471P, N204W/R321S/Q338E/S471P, K233H/S325F/S328N/K331L/I348D/S355L/S471P, K233H/K331L/F388P/K446R/S471P, K260S/S325F/K331L/K446R/S471P, R321S/S328L/K331T/S471P, S325F/S328N/K331L/I348D/S355L/F388P/S471P, S325F/S328N/I348D/S355L/F388P/S471P, S325F/K331L/F388P/S471P, S325F/K331L/K446R/S471P, S328L/K331T/S355M/S471P, S328N/S471P, Q338E/K342R/S355L/S471P, Q338E/K342R/S471P, Q338E/K342R/S471P/K510F, K342R/S355L/Q437S/S471P, K342R/S355M/S471P, S351V/S471P, and F388P/S471P, wherein the amino acid positions are numbered with reference to SEQ ID NO: 46.

[0012] In some further embodiments, the engineered ketoacid decarboxylase polypeptide sequence has at least 85%, 86%, 87%, 88%, 89%, 90%, 91%, 92%, 93%, 94%, 95%, 96%, 97%, 98%, 99%, or more sequence identity to SEQ ID NO: 58, and wherein the polypeptide sequence of said engineered ketoacid decarboxylase polypeptide comprises at least one substitution or substitution set at one or more amino acid positions selected from 18/189/193/260/328, 179, 189, 189/203, 249, 314, 334, 346, 368, 369, 392, 507, 511, 516, 527, and 529, wherein the amino acid positions are numbered with reference to SEQ ID NO: 58. In some additional embodiments, the polypeptide sequence of said engineered ketoacid decarboxylase polypeptide comprises at least one substitution or substitution set selected from 18D/189E/193E/260S/328L, 179V, 189E, 189E/203Q, 249A, 314A, 314S, 314T, 334D, 334G, 334L, 334Q, 346R, 346V, 368E, 369A, 369M, 369R, 369T, 392A, 392G, 392M, 392R, 392S, 507A, 507G, 507K, 511K, 511L, 511V, 516A, 527G, 527R, 529C, 529N, 529R, and 529W, wherein the amino acid positions are numbered with reference to SEQ ID NO: 58. In some additional embodiments, the polypeptide sequence of said engineered ketoacid decarboxylase polypeptide comprises at least one substitution or substitution set selected from E18D/T189E/V193E/K260S/N328L, S179V, T189E, T189E/K203Q, S249A, V314A, V314S, V314T, E334D, E334G, E334L, E334Q, E346R, E346V, Q368E, S369A, S369M, S369R, S369T, N392A, N392G, N392M, N392R, N392S, S507A, S507G, S507K, E511K, E511L, E511V, V516A, E527G, E527R, E529C, E529N, E529R, and E529W, wherein the amino acid positions are numbered with reference to SEQ ID NO: 58.

[0013] In some additional embodiments, the engineered ketoacid decarboxylase polypeptide sequence has at least 85%, 86%, 87%, 88%, 89%, 90%, 91%, 92%, 93%, 94%, 95%, 96%, 97%, 98%, 99%, or more sequence identity to SEQ ID NO: 58, and wherein the polypeptide sequence of said engineered ketoacid decarboxylase polypeptide comprises at least one substitution or substitution set at one or more amino acid positions selected from 13/18, 189/193/342/527, 203, and 295, wherein the amino acid positions are numbered with reference to SEQ ID NO: 58. In some additional embodiments, the polypeptide sequence of said engineered ketoacid decarboxylase polypeptide comprises at least one substitution or substitution set selected from 13K/18D, 189E/193A/342R/527D, 203Q, and 295F, wherein the amino acid positions are numbered with reference to SEQ ID NO: 58. In some additional embodiments, the polypeptide sequence of said engineered ketoacid decarboxylase polypeptide comprises at least one substitution or substitution set selected from H13K/E18D, T189E/V193A/K342R/E527D, K203Q, and L295F, wherein the amino acid positions are numbered with reference to SEQ ID NO: 58.

[0014] In some further embodiments, the engineered ketoacid decarboxylase polypeptide sequence has at least 85%, 86%, 87%, 88%, 89%, 90%, 91%, 92%, 93%, 94%, 95%, 96%, 97%, 98%, 99%, or more sequence identity to SEQ ID NO:2, and wherein the polypeptide sequence of said engineered ketoacid decarboxylase polypeptide comprises at least one substitution or substitution set at one or more amino acid positions selected from 37, 37/144/229/233/320/388, 37/144/351/352, 37/351/388, 37/388, 38, 124, 124/153/442, 124/442, 144, 144/233/388, 144/394, 151, 153/264, 153/264/275/394/442, 153/275, 153/442, 229, 231/232/275/281/442, 233, 233/350/351/355/388/394, 234, 250, 252, 252/275/442, 253, 254, 256, 262, 278, 290/541, 321, 325, 347, 348, 350, 350/351/352/355/388/394, 352, 353, 355, 388, 388/394, 441, 442, 443, 446, and 541, wherein the amino acid positions are numbered with reference to SEQ ID NO: 2.

[0015] In some additional embodiments, the polypeptide sequence of said engineered ketoacid decarboxylase polypeptide comprises at least one substitution or substitution set selected from 37A, 37A/144T/229I/233N/320L/388P, 37A/144T/351D/352E, 37A/351D/388P, 37A/388P, 37D, 37G, 38H, 38S, 124E/153A/442A, 124E/442A, 124K, 144R, 144T, 144T/233N/388P, 144T/394H, 151K, 151Q, 151W, 153A/264E, 153A/264E/275L/394H/442A, 153A/275L, 153A/442A, 229I, 229L, 231K/232F/275L/281A/442A, 233L, 233N/350K/351D/355T/388P/394H, 234A, 250D, 252H, 252H/275L/442A, 253H, 253Y, 254A, 254G, 254S, 256T, 256V, 262T, 278C, 290G/541I, 321E, 321L, 321S, 325F, 325H, 325L, 347L, 347M, 348C, 350K/351D/352E/355T/388P/394H, 350T, 350Y, 352I, 352R, 352T, 352W, 353E, 355E, 355F, 355K, 355V, 355W, 388D, 388N, 388P/394H, 388W, 441T, 442A, 443V, 443W, 446H, 446L, and 541I, wherein the amino acid positions are numbered with reference to SEQ ID NO: 2. In some additional embodiments, the polypeptide sequence of said engineered ketoacid decarboxylase polypeptide comprises at least one substitution or substitution set selected from S37A, S37A/Y144T/V229I/K233N/F320L/F388P, S37A/Y144T/S351D/A352E, S37A/S351D/F388P, S37A/F388P, S37D, S37G, R38H, R38S, M124E/L153A/S442A, M124E/S442A, M124K, Y144R, Y144T, Y144T/K233N/F388P, Y144T/R394H, S151K, S151Q, S151W, L153A/1264E, L153A/1264E/F275L/R394H/S442A, L153A/F275L, L153A/S442A, V229I, V229L, E231K/T232F/F275L/V281A/S442A, K233L, K233N/S350K/S351D/S355T/F388P/R394H, L234A, L250D, S252H, S252H/F275L/S442A, F253H, F253Y, L254A, L254G, L254S, I256T, I256V, S262T, M278C, A290G/L541I, R321E, R321L, R321S, S325F, S325H, S325L, F347L, F347M, I348C, S350K/S351D/A352E/S355T/F388P/R394H, S350T, S350Y, A352I, A352R, A352T, A352W, P353E, S355E, S355F, S355K, S355V, S355W, F388D, F388N, F388P/R394H, F388W, L441T, S442A, I443V, 1443W, K446H, K446L, and L541I, wherein the amino acid positions are numbered with reference to SEQ ID NO: 2.

[0016] In some embodiments, the engineered ketoacid decarboxylase polypeptide sequence has at least 85%, 86%, 87%, 88%, 89%, 90%, 91%, 92%, 93%, 94%, 95%, 96%, 97%, 98%, 99%, or more sequence identity to SEQ ID NO: 46, and wherein the polypeptide sequence of said engineered ketoacid decarboxylase polypeptide comprises at least one substitution or substitution set at one or more amino acid positions selected from 38/124/355, 38/229/253/256/355, 38/325/355, 38/355, 124/152/229/233/321/328/352/446, 124/152/229/233/321/350, 124/152/229/321/348/350/388/482, 124/152/254/328/350/388/446, 124/152/321/348/350/388, 124/152/388, 124/152/388/446, 124/229/256/321/325/355, 124/233/254/328/348/352/388, 124/254/328/348/350, 124/321/325/355, 124/321/348/388, 124/328, 124/328/348/350/352/388, 124/328/348/352/388, 124/328/350/352/446, 124/328/352/388, 124/348/352, 152/229/233/348/350/352, 152/254/321/348, 152/328/388/446, 229/321/446, 233/254/348, 233/325/388/443/446, 253/254/321/325/355, 275/325/446, 321/350/352/446, 328, and 353, wherein the amino acid positions are numbered with reference to SEQ ID NO: 46. In some additional embodiments, the polypeptide sequence of said engineered ketoacid decarboxylase polypeptide comprises at least one substitution or substitution set selected from 38H/124K/355E, 38H/229A/253H/256V/355E, 38H/325F/355L, 38H/355E, 124K/229A/256V/321E/325F/355E, 124K/321E/325F/355L, 124W/152R/229A/233H/321S/328L/352Y/446R, 124W/152R/229A/233H/321S/350G, 124W/152R/229A/321S/348D/350G/388P/482R, 124W/152R/254G/328N/350G/388P/446R, 124W/152R/321S/348D/350G/388P, 124W/152R/388P, 124W/152R/388P/446R, 124W/233H/254G/328L/348D/352N/388P, 124W/254G/328N/348D/350G, 124W/321S/348D/388P, 124W/328L/348D/350G/352Y/388P, 124W/328L/348D/352N/388P, 124W/328L/350G/352N/446R, 124W/328L/352Y/388P, 124W/328N, 124W/348D/352N, 152R/229A/233H/348D/350G/352N, 152R/254G/321S/348D, 152R/328N/388P/446R, 229A/321S/446R, 233H/254G/348D, 233L/325L/388D/443W/446E, 253Y/254A/321E/325F/355E, 275Q/325F/446E, 321S/350G/352N/446R, 328L, and 353D, wherein the amino acid positions are numbered with reference to SEQ ID NO: 46. In some additional embodiments, the polypeptide sequence of said engineered ketoacid decarboxylase polypeptide comprises at least one substitution or substitution set selected from R38H/M124K/S355E, R38H/V229A/F253H/1256V/5355E, R38H/S325F/S355L, R38H/S355E, M124K/V229A/1256V/R321E/S325F/S355E, M124K/R321E/S325F/S355L, M124W/Q152R/V229A/K233H/R321S/S328L/A352Y/K446R, M124W/Q152R/V229A/K233H/R321S/5350G, M124W/Q152R/V229A/R321S/1348D/5350G/F388P/K482R, M124W/Q152R/L254G/S328N/5350G/F388P/K446R, M124W/Q152R/R321S/I348D/5350G/F388P, M124W/Q152R/F388P, M124W/Q152R/F388P/K446R, M124W/K233H/L254G/S328L/1348D/A352N/F388P, M124W/L254G/S328N/1348D/S350G, M124W/R321S/1348D/F388P, M124W/S328L/1348D/5350G/A352Y/F388P, M124W/S328L/1348D/A352N/F388P, M124W/S328L/S350G/A352N/K446R, M124W/S328L/A352Y/F388P, M124W/S328N, M124W/1348D/A352N, Q152R/V229A/K233H/1348D/5350G/A352N, Q152R/L254G/R321S/1348D, Q152R/S328N/F388P/K446R, V229A/R321S/K446R, K233H/L254G/I348D, K233L/S325L/F388D/I443W/K446E, F253Y/L254A/R321E/S325F/S355E, F275Q/S325F/K446E, R321S/S350G/A352N/K446R, S328L, and P353D, wherein the amino acid positions are numbered with reference to SEQ ID NO: 46.

[0017] In some additional embodiments, the engineered ketoacid decarboxylase polypeptide comprises an amino acid sequence having at least 85%, 86%, 87%, 88%, 89%, 90%, 91%, 92%, 93%, 94%, 95%, 96%, 97%, 98%, 99%, or more sequence identity to SEQ ID NO: 2, 46, and/or 58, or a functional fragment thereof. In some additional embodiments, the engineered ketoacid decarboxylase polypeptide comprises an amino acid sequence having at least 90% sequence identity to SEQ ID NO: 2, 46, and/or 58, or a functional fragment thereof. In some additional embodiments, the engineered ketoacid decarboxylase polypeptide comprises an amino acid sequence having at least 95% sequence identity to SEQ ID NO: 2, 46, and/or 58, or a functional fragment thereof. In some embodiments, the engineered ketoacid decarboxylase polypeptide is a variant ketoacid decarboxylase polypeptide provided in any of Table 4.1, Table 4.2, Table 5.1, Table 6.1, Table 6.2, Table 7.1, and/or Table 7.2. In some further embodiments, the engineered ketoacid decarboxylase polypeptide is a Lactococcus lactis variant enzyme. In some embodiments, the ketoacid decarboxylase exhibits at least one improved property as compared to wild-type Lactococcus lactis ketoacid decarboxylase. In yet some additional embodiments, the engineered ketoacid decarboxylase polypeptide is more thermostable than wild-type Lactococcus lactis ketoacid decarboxylase. In yet some further embodiments, the engineered ketoacid decarboxylase polypeptide more resistant to proteolysis than wild-type Lactococcus lactis ketoacid decarboxylase. In some additional embodiments, the engineered ketoacid decarboxylase polypeptide is less immunogenic than wild-type Lactococcus lactis ketoacid decarboxylase. In still some additional embodiments, the engineered ketoacid decarboxylase polypeptide is more serum stable than wild-type Lactococcus lactis ketoacid decarboxylase. In some embodiments, the engineered ketoacid decarboxylase polypeptide comprises a sequence at least 85%, 86%, 87%, 88%, 89%, 90%, 91%, 92%, 93%, 94%, 95%, 96%, 97%, 98%, 99%, or more identical to any of the even-numbered sequences of SEQ ID NOS: 2-524. In some embodiments, the engineered ketoacid decarboxylase polypeptide comprises a sequence at least 90%, identical to any of the even-numbered sequences of SEQ ID NOS: 2-524. In some further embodiments, the engineered ketoacid decarboxylase polypeptide comprises any of the even-numbered sequences of SEQ ID NOS: 2-524. In some additional embodiments, the engineered ketoacid decarboxylase polypeptide is purified. The present invention also provides compositions comprising at least one engineered ketoacid decarboxylase polypeptide provided herein. The present invention also provides compositions comprising an engineered ketoacid decarboxylase polypeptide provided herein.

[0018] The present invention also provides engineered polynucleotide sequences encoding at least one engineered ketoacid decarboxylase polypeptide provided herein. In some embodiments, the engineered polynucleotide sequence encodes an engineered ketoacid decarboxylase polypeptide provided herein. In some embodiments, the engineered polynucleotide sequence comprises a sequence at least 85%, 86%, 87%, 88%, 89%, 90%, 91%, 92%, 93%, 94%, 95%, 96%, 97%, 98%, 99%, or more identical to any of the odd-numbered sequences of SEQ ID NOS: 1-523. In some additional embodiments, the engineered polynucleotide sequence comprises a sequence at least 90% or more identical to any of the odd-numbered sequences of SEQ ID NOS: 1-523. In some further embodiments, the engineered polynucleotide sequence comprises any of the odd-numbered sequences of SEQ ID NOS: 1-523. In some additional embodiments, the engineered polynucleotide sequence is operably linked to a control sequence. In some embodiments, the engineered polynucleotide sequence is codon-optimized.

[0019] The present invention also provides expression vectors comprising at least one engineered polynucleotide sequence provided herein. In some embodiments, the expression vectors further comprise at least one control sequence. In some embodiments, the control sequence comprises a promoter. In some further embodiments, the promoter is a heterologous promoter.

[0020] The present invention also provides host cells transformed with at least one polynucleotide sequence and/or comprising an expression vector provided herein. In some embodiments, the host cells are transformed with at least one polynucleotide sequence provided herein. In some embodiments, the host cells are transformed with a polynucleotide sequence provided herein. In some additional embodiments, the host cell comprise at least one expression vector provided herein. In some further embodiments, the host cells comprise an expression vector provided herein. In some embodiments, the host cell is E. coli.

[0021] The present invention also provides methods of producing an engineered ketoacid decarboxylase polypeptide in a host cell comprising culturing a host cell comprising at least one polynucleotide encoding at least one engineered ketoacid decarboxylase polypeptide provided herein, and/or at least one polynucleotide sequence provided herein, and/or at least one expression vector provided herein, under suitable culture conditions, such that at least one engineered ketoacid decarboxylase polypeptide is produced. In some embodiments, the methods of producing an engineered ketoacid decarboxylase polypeptide in a host cell comprise culturing a host cell comprising at least one polynucleotide encoding at least one engineered ketoacid decarboxylase polypeptide provided herein, under suitable culture conditions, such that at least one engineered ketoacid decarboxylase polypeptide is produced. In some additional embodiments, the methods of producing an engineered ketoacid decarboxylase polypeptide in a host cell comprising culturing a host cell comprising at least one polynucleotide sequence provided herein, under suitable culture conditions, such that at least one engineered ketoacid decarboxylase polypeptide is produced. In some embodiments, the methods of producing an engineered ketoacid decarboxylase polypeptide in a host cell comprise culturing a host cell comprising at least one expression vector provided herein, under suitable culture conditions, such that at least one engineered ketoacid decarboxylase polypeptide is produced. In some embodiments, the methods further comprise recovering at least one engineered ketoacid decarboxylase polypeptide from the culture and/or host cells. In some additional embodiments, the methods further comprise the step of purifying said at least one engineered ketoacid decarboxylase polypeptide.

[0022] The present invention also provides compositions comprising at least one engineered polynucleotide provided herein. In some embodiments, the compositions comprise at least one engineered ketoacid decarboxylase polynucleotide provided herein. In some embodiments, the compositions comprise at least one engineered polynucleotide encoding at least one engineered ketoacid decarboxylase provided herein. In some embodiments, the compositions comprise at least one engineered polynucleotide encoding at least one engineered ketoacid decarboxylase polypeptide provided herein. In some embodiments, the composition is a pharmaceutical composition. In some additional embodiments, the composition further comprises at least one pharmaceutically acceptable excipient and/or carrier. In some embodiments, the composition is suitable for the treatment of maple syrup urine disease. In some additional embodiments, the composition is suitable for use in gene therapy. In still some further embodiments, the composition is suitable for use in gene therapy to treat maple syrup urine disease, and/or elevated blood levels of isoleucine, leucine, alloioleucine and/or valine. In some additional embodiments, the composition is suitable for use in mRNA therapy. In yet some additional embodiments, the composition is suitable for oral administration to a human. In some embodiments, the composition is in the form of a pill, tablet, capsule, gelcap, liquid, or emulsion. In some further embodiments, the pill, tablet, capsule, or gelcap further comprises an enteric coating. In yet some additional embodiments, the composition is suitable for parenteral injection into an animal. In yet some additional embodiments, the composition is suitable for parenteral injection into a human. In some embodiments, the injections are administered on a daily, weekly, or monthly basis. In some additional embodiments, composition is coadministered with at least one additional therapeutically effective compound. In some embodiments, the composition comprises at least one additional therapeutically effective compound.

[0023] The present invention also provides methods for treating and/or preventing the symptoms of maple syrup urine disease in a subject, comprising providing a subject having maple syrup urine disease, and providing the composition provided herein to said subject. In some embodiments, the symptoms of maple syrup urine disease are ameliorated. In some additional embodiments, the subject is able to eat a diet that is less restricted in its in isoleucine, leucine, alloioleucine, and/or valine content than diets required by subjects who have not been provided at least one composition comprising at least one engineered ketoacid decarboxylase polypeptide and/or polynucleotide provided herein. In some embodiments, the subject is able to eat a diet that is less restricted in its in isoleucine, leucine, alloioleucine, and/or valine content than diets required by subjects who have not been provided at least one composition comprising at least one engineered ketoacid decarboxylase polypeptide provided herein. In some further embodiments, the subject is able to eat a diet that is less restricted in its in isoleucine, leucine, alloioleucine, and/or valine content than diets required by subjects who have not been provided at least one composition comprising at least one engineered ketoacid decarboxylase polynucleotide provided herein. In some embodiments, the subject is an infant, child, young adult, or adult. In some embodiments, the subject is an infant. In some embodiments, the subject is a child.

[0024] In some embodiments, the subject is a young adult. In some embodiments, the subject is an adult. The present invention also provides for the use of the compositions provided herein. In some embodiments, the compositions comprise at least one engineered ketoacid decarboxylase polypeptide and/or polynucleotide provided herein. In some embodiments, the compositions comprise at least one engineered ketoacid decarboxylase polypeptide provided herein. In some embodiments, the compositions comprise an engineered ketoacid decarboxylase polypeptide provided herein. In some embodiments, the compositions comprise at least one engineered ketoacid decarboxylase polynucleotide provided herein. In some embodiments, the compositions comprise an engineered ketoacid decarboxylase polynucleotide provided herein. In some embodiments, the compositions comprise at least one polynucleotide encoding at least one engineered ketoacid decarboxylase polypeptide provided herein. In some embodiments, the compositions comprise at least two polynucleotides encoding at least two engineered ketoacid decarboxylase polypeptides provided herein. I n some embodiments, the compositions comprise at least one polynucleotide encoding at least one engineered ketoacid decarboxylase provided herein. In some embodiments, the compositions comprise at least one polynucleotide encoding at least two engineered ketoacid decarboxylases provided herein. In some embodiments, the compositions comprise a polynucleotide encoding an engineered ketoacid decarboxylase polypeptide provided herein.

### DESCRIPTION OF THE DRAWINGS

[0025] FIG. 1 is a graph showing the extracellular level of KIC observed in in normal fibroblast and MSUD fibroblast cells treated with the three KdcA variants.

[0026] FIG. 2 is a graph showing the plasma clearance profiles of SEQ ID NO:46 and WT KdcA (SEQ ID NO: 2).

### DESCRIPTION OF THE INVENTION

[0027] The present invention provides engineered KdcA polypeptides, mutants, biologically active fragments and analogues thereof, and pharmaceutical and industrial compositions comprising the same.

[0028] The invention provides engineered branched chain ketoacid decarboxylase (KdcA) polypeptides and compositions thereof, as well as polynucleotides encoding the engineered (KdcA) polypeptides. In some embodiments, the engineered KdcA polypeptides are optimized to provide enhanced catalytic activity, as well as enhanced stability. The present invention also provides methods for the use of compositions comprising the engineered KdcA polypeptides for therapeutic and industrial purposes.

### Abbreviations and Definitions

[0029] Unless defined otherwise, all technical and scientific terms used herein generally have the same meaning as commonly understood by one of ordinary skill in the art to which this invention pertains. Generally, the nomenclature used herein and the laboratory procedures of cell culture, molecular genetics, microbiology, organic chemistry, analytical chemistry and nucleic acid chemistry described below are those well-known and commonly employed in the art. Such techniques are well-known and described in numerous texts and reference works well known to those of skill in the art. Standard techniques, or modifications thereof, are used for chemical syntheses and chemical analyses. All patents, patent applications, articles and publications mentioned herein, both supra and infra, are hereby expressly incorporated herein by reference.

[0030] Although any suitable methods and materials similar or equivalent to those described herein find use in the practice of the present invention, some methods and materials are described herein. It is to be understood that this invention is not limited to the particular methodology, protocols, and reagents described, as these may vary, depending upon the context they are used by those of skill in the art. Accordingly, the terms defined immediately below are more fully described by reference to the application as a whole. All patents, patent applications, articles and publications mentioned herein, both supra and infra, are hereby expressly incorporated herein by reference.

[0031] Also, as used herein, the singular “a”, “an,” and “the” include the plural references, unless the context clearly indicates otherwise.

[0032] Numeric ranges are inclusive of the numbers defining the range. Thus, every numerical range disclosed herein is intended to encompass every narrower numerical range that falls within such broader numerical range, as if such narrower numerical ranges were all expressly written herein. It is also intended that every maximum (or minimum) numerical limitation disclosed herein includes every lower (or higher) numerical limitation, as if such lower (or higher) numerical limitations were expressly written herein.

[0033] The term “about” means an acceptable error for a particular value. In some instances “about” means within 0.05%, 0.5%, 1.0%, or 2.0%, of a given value range. In some instances, “about” means within 1, 2, 3, or 4 standard deviations of a given value.

[0034] Furthermore, the headings provided herein are not limitations of the various aspects or embodiments of the invention which can be had by reference to the application as a whole. Accordingly, the terms defined immediately below are more fully defined by reference to the application as a whole. Nonetheless, in order to facilitate understanding of the invention, a number of terms are defined below.

[0035] Unless otherwise indicated, nucleic acids are written left to right in 5′ to 3′ orientation; amino acid sequences are written left to right in amino to carboxy orientation, respectively.

[0036] As used herein, the term “comprising” and its cognates are used in their inclusive sense (i.e., equivalent to the term “including” and its corresponding cognates).

[0037] “EC” number refers to the Enzyme Nomenclature of the Nomenclature Committee of the International Union of Biochemistry and Molecular Biology (NC-IUBMB). The IUBMB biochemical classification is a numerical classification system for enzymes based on the chemical reactions they catalyze.

[0038] “ATCC” refers to the American Type Culture Collection whose biorepository collection includes genes and strains.

[0039] “NCBI” refers to National Center for Biological Information and the sequence databases provided therein.

[0040] As used herein, the term “branched chain ketoacid decarboxylase (KdcA) polypeptide” refers to a member of the branched-chain-3-oxoacid decarboxylase enzyme class (EC 4.1.1.72). These enzymes use Mg2+ and the cofactor thiamine diphosphate to catalyze the decarboxylation of various 2-oxo acids. KdcA is a dimeric ˜50 kDa protein that deccarboxylates the branched chain ketoacids generated from valine, leucine, and isoleucine to generate carbon dioxide and the corresponding aldehyde (See e.g., Smit et al., Appl. Environ. Microbiol., 71:303-311 [2005]).

[0041] “Protein,” “polypeptide,” and “peptide” are used interchangeably herein to denote a polymer of at least two amino acids covalently linked by an amide bond, regardless of length or post-translational modification (e.g., glycosylation or phosphorylation).

[0042] “Polynucleotide” is used herein to denote a polymer comprising at least two nucleotides where the nucleotides are either deoxyribonucleotides or ribonucleotides.

[0043] “Amino acids” are referred to herein by either their commonly known three-letter symbols or by the one-letter symbols recommended by IUPAC-IUB Biochemical Nomenclature Commission. Nucleotides, likewise, may be referred to by their commonly accepted single letter codes, as indicated The abbreviations used for the genetically encoded amino acids are conventional and are as follows: alanine (Ala or A), arginine (Are or R), asparagine (Asn or N), aspartate (Asp or D), cysteine (Cys or C), glutamate (Glu or E), glutamine (Gln or Q), histidine (His or H), isoleucine (Ile or I), leucine (Leu or L), lysine (Lys or K), methionine (Met or M), phenylalanine (Phe or F), proline (Pro or P), serine (Ser or S), threonine (Thr or T), tryptophan (Trp or W), tyrosine (Tyr or Y), and valine (Val or V).

[0044] The term “engineered,” “recombinant,” “non-naturally occurring,” and “variant,” when used with reference to a cell, a polynucleotide or a polypeptide refers to a material or a material corresponding to the natural or native form of the material that has been modified in a manner that would not otherwise exist in nature or is identical thereto but produced or derived from synthetic materials and/or by manipulation using recombinant techniques.

[0045] As used herein, “wild-type” and “naturally-occurring” refer to the form found in nature. For example a wild-type polypeptide or polynucleotide sequence is a sequence present in an organism that can be isolated from a source in nature and which has not been intentionally modified by human manipulation.

[0046] “Coding sequence” refers to that part of a nucleic acid (e.g., a gene) that encodes an amino acid sequence of a protein.

[0047] The term “percent (%) sequence identity” is used herein to refer to comparisons among polynucleotides and polypeptides, and are determined by comparing two optimally aligned sequences over a comparison window, wherein the portion of the polynucleotide or polypeptide sequence in the comparison window may comprise additions or deletions (i.e., gaps) as compared to the reference sequence for optimal alignment of the two sequences. The percentage may be calculated by determining the number of positions at which the identical nucleic acid base or amino acid residue occurs in both sequences to yield the number of matched positions, dividing the number of matched positions by the total number of positions in the window of comparison and multiplying the result by 100 to yield the percentage of sequence identity. Alternatively, the percentage may be calculated by determining the number of positions at which either the identical nucleic acid base or amino acid residue occurs in both sequences or a nucleic acid base or amino acid residue is aligned with a gap to yield the number of matched positions, dividing the number of matched positions by the total number of positions in the window of comparison and multiplying the result by 100 to yield the percentage of sequence identity. Those of skill in the art appreciate that there are many established algorithms available to align two sequences. Optimal alignment of sequences for comparison can be conducted (e.g., by the local homology algorithm of Smith and Waterman; Smith and Waterman, Adv. Appl. Math., 2:482 [1981]), by the homology alignment algorithm of Needleman and Wunsch (Needleman and Wunsch, J. Mol. Biol., 48:443 [1970]), by the search for similarity method of Pearson and Lipman (Pearson and Lipman, Proc. Natl. Acad. Sci. USA 85:2444 [1988]), by computerized implementations of these algorithms (e.g., GAP, BESTFIT, FASTA, and TFASTA in the GCG Wisconsin Software Package), or by visual inspection, as known in the art. Examples of algorithms that are suitable for determining percent sequence identity and sequence similarity include, but are not limited to the BLAST and BLAST 2.0 algorithms (See e.g., Altschul et al., J. Mol. Biol., 215: 403-410 [1990]; and Altschul et al., Nucleic Acids Res., 3389-3402 [1977]). Software for performing BLAST analyses is publicly available through the National Center for Biotechnology Information website. This algorithm involves first identifying high scoring sequence pairs (HSPs) by identifying short words of length “W” in the query sequence, which either match or satisfy some positive-valued threshold score “T,” when aligned with a word of the same length in a database sequence. T is referred to as the neighborhood word score threshold (See, Altschul et al., supra). These initial neighborhood word hits act as seeds for initiating searches to find longer HSPs containing them. The word hits are then extended in both directions along each sequence for as far as the cumulative alignment score can be increased. Cumulative scores are calculated using, for nucleotide sequences, the parameters “M” (reward score for a pair of matching residues; always >0) and “N” (penalty score for mismatching residues; always <0). For amino acid sequences, a scoring matrix is used to calculate the cumulative score. Extension of the word hits in each direction are halted when: the cumulative alignment score falls off by the quantity “X” from its maximum achieved value; the cumulative score goes to zero or below, due to the accumulation of one or more negative-scoring residue alignments; or the end of either sequence is reached. The BLAST algorithm parameters W, T, and X determine the sensitivity and speed of the alignment. The BLASTN program (for nucleotide sequences) uses as defaults a wordlength (W) of 11, an expectation (E) of 10, M=5, N=−4, and a comparison of both strands. For amino acid sequences, the BLASTP program uses as defaults a wordlength (W) of 3, an expectation (E) of 10, and the BLOSUM62 scoring matrix (See e.g., Henikoff and Henikoff, Proc. Natl. Acad. Sci. USA 89:10915 [1989]). Exemplary determination of sequence alignment and % sequence identity can employ the BESTFIT or GAP programs in the GCG Wisconsin Software package (Accelrys, Madison Wis.), using default parameters provided.

[0048] “Reference sequence” refers to a defined sequence used as a basis for a sequence comparison. A reference sequence may be a subset of a larger sequence, for example, a segment of a full-length gene or polypeptide sequence. Generally, a reference sequence is at least 20 nucleotide or amino acid residues in length, at least 25 residues in length, at least 50 residues in length, at least 100 residues in length or the full length of the nucleic acid or polypeptide. Since two polynucleotides or polypeptides may each (1) comprise a sequence (i.e., a portion of the complete sequence) that is similar between the two sequences, and (2) may further comprise a sequence that is divergent between the two sequences, sequence comparisons between two (or more) polynucleotides or polypeptide are typically performed by comparing sequences of the two polynucleotides or polypeptides over a “comparison window” to identify and compare local regions of sequence similarity. In some embodiments, a “reference sequence” can be based on a primary amino acid sequence, where the reference sequence is a sequence that can have one or more changes in the primary sequence. For instance, the phrase “reference sequence based on SEQ ID NO:4 having a valine at the residue corresponding to X39” refers to a reference sequence in which the corresponding residue at position X39 in SEQ ID NO:4 (e.g., an alanine), has been changed to valine.

[0049] “Comparison window” refers to a conceptual segment of at least about 20 contiguous nucleotide positions or amino acids residues wherein a sequence may be compared to a reference sequence of at least 20 contiguous nucleotides or amino acids and wherein the portion of the sequence in the comparison window may comprise additions or deletions (i.e., gaps) of 20 percent or less as compared to the reference sequence (which does not comprise additions or deletions) for optimal alignment of the two sequences. The comparison window can be longer than 20 contiguous residues, and includes, optionally 30, 40, 50, 100, or longer windows.

[0050] “Corresponding to”, “reference to,” and “relative to” when used in the context of the numbering of a given amino acid or polynucleotide sequence refer to the numbering of the residues of a specified reference sequence when the given amino acid or polynucleotide sequence is compared to the reference sequence. In other words, the residue number or residue position of a given polymer is designated with respect to the reference sequence rather than by the actual numerical position of the residue within the given amino acid or polynucleotide sequence. For example, a given amino acid sequence, such as that of an engineered KDCA, can be aligned to a reference sequence by introducing gaps to optimize residue matches between the two sequences. In these cases, although the gaps are present, the numbering of the residue in the given amino acid or polynucleotide sequence is made with respect to the reference sequence to which it has been aligned.

[0051] “Amino acid difference” and “residue difference” refer to a difference in the amino acid residue at a position of a polypeptide sequence relative to the amino acid residue at a corresponding position in a reference sequence. The positions of amino acid differences generally are referred to herein as “Xn,” where n refers to the corresponding position in the reference sequence upon which the residue difference is based. For example, a “residue difference at position X91 as compared to SEQ ID NO:4” refers to a difference of the amino acid residue at the polypeptide position corresponding to position 91 of SEQ ID NO:4. Thus, if the reference polypeptide of SEQ ID NO:4 has a alanine at position 91, then a “residue difference at position X91 as compared to SEQ ID NO:4” refers to an amino acid substitution of any residue other than alanine at the position of the polypeptide corresponding to position 91 of SEQ ID NO:4. In most instances herein, the specific amino acid residue difference at a position is indicated as “XnY” where “Xn” specified the corresponding residue and position of the reference polypeptide (as described above), and “Y” is the single letter identifier of the amino acid found in the engineered polypeptide (i.e., the different residue than in the reference polypeptide). In some instances (e.g., in the Tables in the Examples), the present disclosure also provides specific amino acid differences denoted by the conventional notation “AnB”, where A is the single letter identifier of the residue in the reference sequence, “n” is the number of the residue position in the reference sequence, and B is the single letter identifier of the residue substitution in the sequence of the engineered polypeptide. In some instances, a polypeptide of the present disclosure can include one or more amino acid residue differences relative to a reference sequence, which is indicated by a list of the specified positions where residue differences are present relative to the reference sequence. In some embodiments, where more than one amino acid can be used in a specific residue position of a polypeptide, the various amino acid residues that can be used are separated by a “/” (e.g., X307G/X307Q or X307G/Q). The present disclosure includes engineered polypeptide sequences comprising one or more amino acid differences that include either/or both conservative and non-conservative amino acid substitutions.

[0052] The terms “amino acid substitution set” and “substitution set” refers to a group of amino acid substitutions within a polypeptide sequence. In some embodiments, substitution sets comprise 1, 2, 3, 4, 5, 6, 7, 8, 9, 10, 11, 12, 13, 14, 15, or more amino acid substitutions. In some embodiments, a substitution set refers to the set of amino acid substitutions that is present in any of the variant KdcA polypeptides listed in any of the Tables in the Examples.

[0053] “Conservative amino acid substitution” refers to a substitution of a residue with a different residue having a similar side chain, and thus typically involves substitution of the amino acid in the polypeptide with amino acids within the same or similar defined class of amino acids. By way of example and not limitation, an amino acid with an aliphatic side chain may be substituted with another aliphatic amino acid (e.g., alanine, valine, leucine, and isoleucine); an amino acid with hydroxyl side chain is substituted with another amino acid with a hydroxyl side chain (e.g., serine and threonine); an amino acid having aromatic side chains is substituted with another amino acid having an aromatic side chain (e.g., phenylalanine, tyrosine, tryptophan, and histidine); an amino acid with a basic side chain is substituted with another amino acid with a basic side chain (e.g., lysine and arginine); an amino acid with an acidic side chain is substituted with another amino acid with an acidic side chain (e.g., aspartic acid or glutamic acid); and a hydrophobic or hydrophilic amino acid is replaced with another hydrophobic or hydrophilic amino acid, respectively. Exemplary conservative substitutions include the substitution of A, L, V, or I with other aliphatic residues (e.g., A, L, V, I) or other non-polar residues (e.g., A, L, V, I, G, M); substitution of G or M with other non-polar residues (e.g., A, L, V, I, G, M); substitution of D or E with other acidic residues (e.g., D, E); substitution of K or R with other basic residues (e.g., K, R); substitution of N, Q, S, or T with other polar residues (e.g., N, Q, S, T); substitution of H, Y, W, or F with other aromatic residues (e.g., H, Y, W, F); or substitution of C or P with other non-polar residues (e.g., C, P).

[0054] “Non-conservative substitution” refers to substitution of an amino acid in the polypeptide with an amino acid with significantly differing side chain properties. Non-conservative substitutions may use amino acids between, rather than within, the defined groups and affect: (a) the structure of the peptide backbone in the area of the substitution (e.g., proline for glycine); (b) the charge or hydrophobicity; and/or (c) the bulk of the side chain. By way of example and not limitation, exemplary non-conservative substitutions include an acidic amino acid substituted with a basic or aliphatic amino acid; an aromatic amino acid substituted with a small amino acid; and a hydrophilic amino acid substituted with a hydrophobic amino acid.

[0055] “Deletion” refers to modification to the polypeptide by removal of one or more amino acids from the reference polypeptide. Deletions can comprise removal of 1 or more amino acids, 2 or more amino acids, 5 or more amino acids, 10 or more amino acids, 15 or more amino acids, or 20 or more amino acids, up to 10% of the total number of amino acids, or up to 20% of the total number of amino acids making up the reference enzyme while retaining enzymatic activity and/or retaining the improved properties of an engineered transaminase enzyme. Deletions can be directed to the internal portions and/or terminal portions of the polypeptide. In various embodiments, the deletion can comprise a continuous segment or can be discontinuous.

[0056] “Insertion” refers to modification to the polypeptide by addition of one or more amino acids from the reference polypeptide. Insertions can be in the internal portions of the polypeptide, or to the carboxy or amino terminus. Insertions as used herein include fusion proteins as is known in the art. The insertion can be a contiguous segment of amino acids or separated by one or more of the amino acids in the naturally occurring polypeptide.

[0057] The terms “functional fragment” and “biologically active fragment” are used interchangeably herein, to refer to a polypeptide that has an amino-terminal and/or carboxy-terminal deletion(s) and/or internal deletions, but where the remaining amino acid sequence is identical to the corresponding positions in the sequence to which it is being compared (e.g., a full length engineered KDCA of the present invention) and that retains substantially all of the activity of the full-length polypeptide.

[0058] “Isolated polypeptide” refers to a polypeptide which is substantially separated from other contaminants that naturally accompany it (e.g., protein, lipids, and polynucleotides). The term embraces polypeptides which have been removed or purified from their naturally-occurring environment or expression system (e.g., host cell or in vitro synthesis). The recombinant KDCA polypeptides may be present within a cell, present in the cellular medium, or prepared in various forms, such as lysates or isolated preparations. As such, in some embodiments, the recombinant KDCA polypeptides provided herein are isolated polypeptides.

[0059] “Substantially pure polypeptide” refers to a composition in which the polypeptide species is the predominant species present (i.e., on a molar or weight basis it is more abundant than any other individual macromolecular species in the composition), and is generally a substantially purified composition when the object species comprises at least about 50 percent of the macromolecular species present by mole or % weight. Generally, a substantially pure KdcA composition will comprise about 60% or more, about 70% or more, about 80% or more, about 90% or more, about 95% or more, and about 98% or more of all macromolecular species by mole or % weight present in the composition. In some embodiments, the object species is purified to essential homogeneity (i.e., contaminant species cannot be detected in the composition by conventional detection methods) wherein the composition consists essentially of a single macromolecular species. Solvent species, small molecules (<500 Daltons), and elemental ion species are not considered macromolecular species. In some embodiments, the isolated recombinant KdcA polypeptides are substantially pure polypeptide compositions.

[0060] “Improved enzyme property” refers to an engineered KdcA polypeptide that exhibits an improvement in any enzyme property as compared to a reference KdcA polypeptide, such as a wild-type KdcA polypeptide (e.g., wild-type KdcA having SEQ ID NO: 2) or another engineered KdcA polypeptide. Improved properties include but are not limited to such properties as increased protein production, increased serum stability, increased serum half-life in vivo, increased thermoactivity, increased thermostability, increased pH activity, increased stability, increased enzymatic activity, increased substrate specificity and/or affinity, increased specific activity, increased resistance to substrate and/or end-product inhibition, increased chemical stability, improved chemoselectivity, improved solvent stability, increased tolerance to acidic pH, increased tolerance to proteolytic activity (i.e., reduced sensitivity to proteolysis), reduced aggregation, increased solubility, reduced immunogenicity (i.e., reduced capability of inducing and/or eliciting an immune response), and altered temperature profile.

[0061] “Increased enzymatic activity” and “enhanced catalytic activity” refer to an improved property of the engineered KdcA polypeptides, which can be represented by an increase in specific activity (e.g., product produced/time/weight protein) and/or an increase in percent conversion of the substrate to the product (e.g., percent conversion of starting amount of substrate to product in a specified time period using a specified amount of KdcA) as compared to the reference KdcA enzyme (e.g., wild-type KdcA and/or another engineered KdcA). Exemplary methods to determine enzyme activity are provided in the Examples. Any property relating to enzyme activity may be affected, including the classical enzyme properties of Km, Vmax or kcat, changes of which can lead to increased enzymatic activity. Improvements in enzyme activity can be from about 1.1 fold the enzymatic activity of the corresponding wild-type enzyme, to as much as 2-fold, 5-fold, 10-fold, 20-fold, 25-fold, 50-fold, 75-fold, 100-fold, 150-fold, 200-fold or more enzymatic activity than the naturally occurring KdcA or another engineered KdcA from which the KdcA polypeptides were derived.

[0062] In some embodiments, the engineered KdcA polypeptides have a kcat of at least 0.1/sec, at least 0.2/sec, at least 0.3/sec, at least 0.5/sec, at least 1.0/sec, and in some preferred embodiments greater than 2.0/sec. In some embodiments, the Km is in the range of about 1 μm to about 5 mM; in the range of about 5 μm to about 2 mM; in the range of about 10 μm to about 2 mM; or in the range of about 10 μm to about 1 mM. In some specific embodiments, the engineered KdcA enzyme exhibits improved enzymatic activity in the range of 1.5 to 10 fold, 1.5 to 25 fold, 1.5 to 50 fold, 1.5 to 100 fold or greater, than that of the reference KdcA enzyme. KdcA activity can be measured by any standard assay known in the art (e.g., by monitoring changes in spectrophotometric properties of reactants or products). In some embodiments, the amount of products produced or the amount of substrate consumed is measured by High-Performance Liquid Chromatography (HPLC) separation combined with UV absorbance or mass spectra detection and Gas Chromatography (GC) directly or following 3-methylbutanal derivatization. In some embodiments, comparisons of enzyme activities are made using a defined preparation of enzyme, a defined assay under a set condition, and one or more defined substrates, as further described in detail herein. Generally, when lysates are compared, the numbers of cells and the amount of protein assayed are determined as well as use of identical expression systems and identical host cells, in order to minimize variations in amount of enzyme produced by the host cells and present in the lysates.

[0063] The phrase “increased storage stability” means that an engineered KdcA polypeptide according to the invention will retain more activity compared to a reference KdcA in a standard assay (e.g., as described in the Examples) after it has been produced in a dried form (e.g., by lyophilization or spray-drying), and stored for a period of time ranging from a few days to multiple months at a temperature above room temperature (e.g., 30° C., 37° C., 45° C., 55° C., etc.).

[0064] “Conversion” refers to the enzymatic conversion (or biotransformation) of substrate(s) to the corresponding product(s). “Percent conversion” refers to the percent of the substrate that is converted to the product within a period of time under specified conditions. Thus, the “enzymatic activity” or “activity” of a KDCA polypeptide can be expressed as “percent conversion” of the substrate to the product in a specific period of time.

[0065] “Hybridization stringency” relates to hybridization conditions, such as washing conditions, in the hybridization of nucleic acids. Generally, hybridization reactions are performed under conditions of lower stringency, followed by washes of varying but higher stringency. The term “moderately stringent hybridization” refers to conditions that permit target-DNA to bind a complementary nucleic acid that has about 60% identity, preferably about 75% identity, about 85% identity to the target DNA, with greater than about 90% identity to target-polynucleotide. Exemplary moderately stringent conditions are conditions equivalent to hybridization in 50% formamide, 5×Denhart's solution, 5×SSPE, 0.2% SDS at 42° C., followed by washing in 0.2×SSPE, 0.2% SDS, at 42° C. “High stringency hybridization” refers generally to conditions that are about 10° C. or less from the thermal melting temperature Tm as determined under the solution condition for a defined polynucleotide sequence. In some embodiments, a high stringency condition refers to conditions that permit hybridization of only those nucleic acid sequences that form stable hybrids in 0.018M NaCl at 65° C. (i.e., if a hybrid is not stable in 0.018M NaCl at 65° C., it will not be stable under high stringency conditions, as contemplated herein). High stringency conditions can be provided, for example, by hybridization in conditions equivalent to 50% formamide, 5×Denhart's solution, 5×SSPE, 0.2% SDS at 42° C., followed by washing in 0.1×SSPE, and 0.1% SDS at 65° C. Another high stringency condition is hybridizing in conditions equivalent to hybridizing in 5×SSC containing 0.1% (w:v) SDS at 65° C. and washing in 0.1×SSC containing 0.1% SDS at 65° C. Other high stringency hybridization conditions, as well as moderately stringent conditions, are described in the references cited above.

[0066] “Codon optimized” refers to changes in the codons of the polynucleotide encoding a protein to those preferentially used in a particular organism such that the encoded protein is more efficiently expressed in that organism. Although the genetic code is degenerate, in that most amino acids are represented by several codons, called “synonyms” or “synonymous” codons, it is well known that codon usage by particular organisms is nonrandom and biased towards particular codon triplets. This codon usage bias may be higher in reference to a given gene, genes of common function or ancestral origin, highly expressed proteins versus low copy number proteins, and the aggregate protein coding regions of an organism's genome. In some embodiments, the polynucleotides encoding the KdcA enzymes are codon optimized for optimal production from the host organism selected for expression. “Control sequence” refers herein to include all components that are necessary or advantageous for the expression of a polynucleotide and/or polypeptide of the present disclosure. Each control sequence may be native or foreign to the nucleic acid sequence encoding the polypeptide. Such control sequences include, but are not limited to, leaders, polyadenylation sequences, propeptide sequences, promoter sequences, signal peptide sequences, initiation sequences, and transcription terminators. At a minimum, the control sequences include a promoter, and transcriptional and translational stop signals. In some embodiments, the control sequences are provided with linkers for the purpose of introducing specific restriction sites facilitating ligation of the control sequences with the coding region of the nucleic acid sequence encoding a polypeptide.

[0067] “Operably linked” is defined herein as a configuration in which a control sequence is appropriately placed (i.e., in a functional relationship) at a position relative to a polynucleotide of interest such that the control sequence directs or regulates the expression of the polynucleotide encoding a polypeptide of interest.

[0068] “Promoter sequence” refers to a nucleic acid sequence that is recognized by a host cell for expression of a polynucleotide of interest, such as a coding sequence. The promoter sequence contains transcriptional control sequences that mediate the expression of a polynucleotide of interest. The promoter may be any nucleic acid sequence which shows transcriptional activity in the host cell of choice including mutant, truncated, and hybrid promoters, and may be obtained from genes encoding extracellular or intracellular polypeptides either homologous or heterologous to the host cell.

[0069] “Substrate” in the context of an enzymatic conversion reaction process refers to the compound or molecule acted on by the KdcA polypeptide. “Product” in the context of an enzymatic conversion process refers to the compound or molecule resulting from the action of the KdcA polypeptide on the substrate.

[0070] As used herein the term “culturing” refers to the growing of a population of microbial cells under suitable conditions using any suitable medium (e.g., liquid, gel, or solid).

[0071] Recombinant polypeptides (e.g., KdcA enzyme variants) can be produced using any suitable methods known the art. For example, there is a wide variety of different mutagenesis techniques well known to those skilled in the art. In addition, mutagenesis kits are also available from many commercial molecular biology suppliers. Methods are available to make specific substitutions at defined amino acids (site-directed), specific or random mutations in a localized region of the gene (regio-specific), or random mutagenesis over the entire gene (e.g., saturation mutagenesis). Numerous suitable methods are known to those in the art to generate enzyme variants, including but not limited to site-directed mutagenesis of single-stranded DNA or double-stranded DNA using PCR, cassette mutagenesis, gene synthesis, error-prone PCR, shuffling, and chemical saturation mutagenesis, or any other suitable method known in the art. Non-limiting examples of methods used for DNA and protein engineering are provided in the following patents: U.S. Pat. Nos. 6,117,679; 6,420,175; 6,376,246; 6,586,182; 7,747,391; 7,747,393; 7,783,428; and 8,383,346. After the variants are produced, they can be screened for any desired property (e.g., high or increased activity, or low or reduced activity, increased thermal activity, increased thermal stability, and/or acidic pH stability, etc.). In some embodiments, “recombinant KdcA polypeptides” (also referred to herein as “engineered KdcA polypeptides,” “variant KdcA enzymes,” and “KdcA variants”) find use.

[0072] As used herein, a “vector” is a DNA construct for introducing a DNA sequence into a cell. In some embodiments, the vector is an expression vector that is operably linked to a suitable control sequence capable of effecting the expression in a suitable host of the polypeptide encoded in the DNA sequence. In some embodiments, an “expression vector” has a promoter sequence operably linked to the DNA sequence (e.g., transgene) to drive expression in a host cell, and in some embodiments, also comprises a transcription terminator sequence.

[0073] As used herein, the term “expression” includes any step involved in the production of the polypeptide including, but not limited to, transcription, post-transcriptional modification, translation, and post-translational modification. In some embodiments, the term also encompasses secretion of the polypeptide from a cell.

[0074] As used herein, an amino acid or nucleotide sequence (e.g., a promoter sequence, signal peptide, terminator sequence, etc.) is “heterologous” to another sequence with which it is operably linked if the two sequences are not associated in nature.

[0075] As used herein, the terms “host cell” and “host strain” refer to suitable hosts for expression vectors comprising DNA provided herein (e.g., a polynucleotide sequences encoding at least one KdcA variant). In some embodiments, the host cells are prokaryotic or eukaryotic cells that have been transformed or transfected with vectors constructed using recombinant DNA techniques as known in the art.

[0076] The term “analogue” means a polypeptide having more than 70% sequence identity but less than 100% sequence identity (e.g., more than 75%, 78%, 80%, 83%, 85%, 88%, 90%, 91%, 92%, 93%, 94%, 95%, 96%, 97%, 98%, 99% sequence identity) with a reference polypeptide. In some embodiments, analogues include non-naturally occurring amino acid residues including, but not limited, to homoarginine, ornithine and norvaline, as well as naturally occurring amino acids. In some embodiments, analogues also include one or more D-amino acid residues and non-peptide linkages between two or more amino acid residues.

[0077] The term “therapeutic” refers to a compound administered to a subject who shows signs or symptoms of pathology having beneficial or desirable medical effects.

[0078] The term “pharmaceutical composition” refers to a composition suitable for pharmaceutical use in a mammalian subject (e.g., human) comprising a pharmaceutically effective amount of an engineered KDCA polypeptide encompassed by the invention and an acceptable carrier.

[0079] The term “gene therapy” is used in reference to the use of genes (i.e., genetic material) to treat and/or prevent disease in a mammalian subject (e.g., human). In some embodiments, the genetic material is introduced directly into at least some cells of the mammalian subject. It is not intended that the present invention be limited to any specific method(s) or composition(s) useful for gene therapy.

[0080] The term “mRNA therapy” is used in reference to the use of messenger RNA (mRNA) to treat and/or prevent disease in a mammalian subject (e.g., human). In some embodiments, the genetic material is introduced directly into at least some cells of the mammalian subject. It is not intended that the present invention be limited to any specific method(s) or composition(s) useful for mRNA therapy.

[0081] The term “effective amount” means an amount sufficient to produce the desired result. One of general skill in the art may determine what the effective amount by using routine experimentation.

[0082] The terms “isolated” and “purified” are used to refer to a molecule (e.g., an isolated nucleic acid, polypeptide, etc.) or other component that is removed from at least one other component with which it is naturally associated. The term “purified” does not require absolute purity, rather it is intended as a relative definition.

[0083] The term “subject” encompasses mammals such as humans, non-human primates, livestock, companion animals, and laboratory animals (e.g., rodents and lagamorphs). It is intended that the term encompass females as well as males.

[0084] As used herein, the term “patient” means any subject that is being assessed for, treated for, or is experiencing disease.

[0085] The term “infant” refers to a child in the period of the first month after birth to approximately one (1) year of age. As used herein, the term “newborn” refers to child in the period from birth to the 28th day of life. The term “premature infant” refers to an infant born after the twentieth completed week of gestation, yet before full term, generally weighing ˜500 to ˜2499 grams at birth. A “very low birth weight infant” is an infant weighing less than 1500 g at birth.

[0086] As used herein, the term “child” refers to a person who has not attained the legal age for consent to treatment or research procedures. In some embodiments, the term refers to a person between the time of birth and adolescence.

[0087] As used herein, the term “adult” refers to a person who has attained legal age for the relevant jurisdiction (e.g., 18 years of age in the United States). In some embodiments, the term refers to any fully grown, mature organism. In some embodiments, the term “young adult” refers to a person less than 18 years of age, but who has reached sexual maturity.

[0088] As used herein, “composition” and “formulation” encompass products comprising at least one engineered KdcA of the present invention, intended for any suitable use (e.g., pharmaceutical compositions, dietary/nutritional supplements, feed, etc.).

[0089] The terms “administration” and “administering” a composition mean providing a composition of the present invention to a subject (e.g., to a person suffering from the effects of MSUD).

[0090] The term “carrier” when used in reference to a pharmaceutical composition means any of the standard pharmaceutical carrier, buffers, and excipients, such as stabilizers, preservatives, and adjuvants.

[0091] The term “pharmaceutically acceptable” means a material that can be administered to a subject without causing any undesirable biological effects or interacting in a deleterious manner with any of the components in which it is contained and that possesses the desired biological activity.

[0092] As used herein, the term “excipient” refers to any pharmaceutically acceptable additive, carrier, diluent, adjuvant, or other ingredient, other than the active pharmaceutical ingredient (API; e.g., the engineered KdcA polypeptides of the present invention). Excipients are typically included for formulation and/or administration purposes.

[0093] The term “therapeutically effective amount” when used in reference to symptoms of disease/condition refers to the amount and/or concentration of a compound (e.g., engineered KdcA polypeptides) that ameliorates, attenuates, or eliminates one or more symptom of a disease/condition or prevents or delays the onset of symptom(s) (e.g., MSUD). In some embodiments, the term is use in reference to the amount of a composition that elicits the biological (e.g., medical) response by a tissue, system, or animal subject that is sought by the researcher, physician, veterinarian, or other clinician.

[0094] The term “therapeutically effective amount” when used in reference to a disease/condition refers to the amount and/or concentration of a composition that ameliorates, attenuates, or eliminates the disease/condition.

[0095] It is intended that the terms “treating,” “treat” and “treatment” encompass preventative (e.g., prophylactic), as well as palliative treatment.

[0096] As used herein, the term “at least one” is not intended to limit the invention to any particular number of items. It is intended to encompass one, two, three, four, five, six, seven, eight, nine, ten, or more items, as desired.

### Engineered KDCA Polypeptides:

[0097] The parent KDCA polypeptides from which the engineered KdcA polypeptides of the invention are derived from include bacterial strains such as Lactococcus lactis.

[0098] Furthermore, when a particular KdcA variant (i.e., an engineered KDCA polypeptide) is referred to by reference to modification of particular amino acids residues in the sequence of a wild-type KDCA or reference KDCA it is to be understood that variants of another KDCA modified in the equivalent position(s) (as determined from the optional amino acid sequence alignment between the respective amino acid sequences) are encompassed herein.

[0099] In some embodiments, engineered KDCA polypeptides are produced by cultivating a microorganism comprising at least one polynucleotide sequence encoding at least one engineered KDCA polypeptide under conditions which are conducive for producing the engineered KDCA polypeptide. In some embodiments, the engineered KDCA polypeptide is subsequently recovered from the resulting culture medium and/or cells.

[0100] The present invention provides exemplary engineered KDCA polypeptides having KDCA activity. The Examples provide Tables showing sequence structural information correlating specific amino acid sequence features with the functional activity of the engineered KDCA polypeptides. This structure-function correlation information is provided in the form of specific amino acid residue differences relative to the reference engineered polypeptide of SEQ ID NO: 2, as well as associated experimentally determined activity data for the exemplary engineered KDCA polypeptides.

[0101] In some embodiments, the engineered KDCA polypeptides of the present invention having KdcA activity comprise a) an amino acid sequence having at least 85% sequence identity to reference sequence SEQ ID NO:2; b) an amino acid residue difference as compared to SEQ ID NO:2 at one or more amino acid positions; and c) which exhibits an improved property selected from i) enhanced serum stability, ii) enhanced catalytic activity, iii) reduced proteolytic sensitivity, iv) reduced aggregation, v) increased stability as a lyophilized preparation to elevated temperatures, vi) reduced immunogenicity, or a combination of any of i), ii), iii), iv), v), or vi) as compared to the reference sequence.

[0102] In some embodiments, the present invention provides functional fragments of engineered KdcA polypeptides. In some embodiments, functional fragments comprise at least about 90%, at least about 95%, at least about 96%, at least about 97%, at least about 98%, or at least about 99% of the activity of the engineered KdcA polypeptide from which it was derived (i.e., the parent engineered KdcA). In some embodiments, functional fragments comprise at least about 90%, at least about 91%, at least about 92%, at least about 93%, at least about 94%, at least about 95%, at least about 96%, at least about 97%, at least about 98%, or at least about 99% of the parent sequence of the engineered KdcA. In some embodiments the functional fragment is truncated by less than 5, less than 10, less than 15, less than 10, less than 25, less than 30, less than 35, less than 40, less than 45, and less than 50 amino acids.

[0103] In some embodiments, the present invention provides functional fragments of engineered KDCA polypeptides. In some embodiments, functional fragments comprise at least about 95%, 96%, 97%, 98%, or 99% of the activity of the engineered KDCA polypeptide from which it was derived (i.e., the parent engineered KDCA). In some embodiments, functional fragments comprise at least 90%, 91%, 92%, 93%, 94%, 95%, 96%, 97%, 98%, or 99% of the parent sequence of the engineered KDCA. In some embodiments the functional fragment is truncated by less than 5, less than 10, less than 15, less than 10, less than 25, less than 30, less than 35, less than 40, less than 45, less than 50, less than 55, less than 60, less than 65, or less than 70 amino acids.

[0104] In some embodiments, the engineered KDCA polypeptide comprises an amino acid sequence having at least about 80%, 85%, 86%, 87%, 88%, 89%, 90%, 91%, 92%, 93%, 94%, 95%, 96%, 97%, 98%, 99% or more identity to a reference sequence selected from SEQ ID NOS: 2, 46, and/or 58, or the amino acid sequence of any variant (e.g., those provided in the Examples). In some embodiments, the reference sequence is selected from SEQ ID NOS: 2, 46, and/or 58.

[0105] In some embodiments, the engineered KDCA polypeptide comprises an amino acid sequence having at least 80%, 85%, 86%, 87%, 88%, 89%, 90%, 91%, 92%, 93%, 94%, 95%, 96%, 97%, 98%, 99%, or more sequence identity to reference sequence SEQ ID NO: 2, 46, and/or 58, and one or more residue differences as compared to SEQ ID NO: 4, 46, and/or 58.

Polynucleotides Encoding Engineered Polypeptides. Expression Vectors and Host Cells:

[0106] The present invention provides polynucleotides encoding the engineered KDCA polypeptides described herein. In some embodiments, the polynucleotides are operatively linked to one or more heterologous regulatory sequences that control gene expression to create a recombinant polynucleotide capable of expressing the polypeptide. In some embodiments, expression constructs containing at least one heterologous polynucleotide encoding the engineered KDCA polypeptide(s) is introduced into appropriate host cells to express the corresponding KDCA polypeptide(s).

[0107] As will be apparent to the skilled artisan, availability of a protein sequence and the knowledge of the codons corresponding to the various amino acids provide a description of all the polynucleotides capable of encoding the subject polypeptides. The degeneracy of the genetic code, where the same amino acids are encoded by alternative or synonymous codons, allows an extremely large number of nucleic acids to be made, all of which encode an engineered KDCA polypeptide. Thus, the present invention provides methods and compositions for the production of each and every possible variation of KDCA polynucleotides that could be made that encode the KDCA polypeptides described herein by selecting combinations based on the possible codon choices, and all such variations are to be considered specifically disclosed for any polypeptide described herein, including the amino acid sequences presented in the Examples (e.g., in the various Tables).

[0108] In some embodiments, the codons are preferably optimized for utilization by the chosen host cell for protein production. For example, preferred codons used in bacteria are typically used for expression in bacteria. Consequently, codon optimized polynucleotides encoding the engineered KDCA polypeptides contain preferred codons at about 40%, 50%, 60%, 70%, 80%, 90%, or greater than 90% of the codon positions in the full length coding region.

[0109] In some embodiments, the KDCA polynucleotide encodes an engineered polypeptide having KDCA activity with the properties disclosed herein, wherein the polypeptide comprises an amino acid sequence having at least 80%, 85%, 86%, 87%, 88%, 89%, 90%, 91%, 92%, 93%, 94%, 95%, 96%, 97%, 98%, 99% or more identity to a reference sequence selected from SEQ ID NOS: 2, 46, and/or 58, or the amino acid sequence of any variant (e.g., those provided in the Examples), and one or more residue differences as compared to the reference polynucleotide of SEQ ID NOS: 1, 45, and/or 57, or the amino acid sequence of any variant as disclosed in the Examples (for example 1, 2, 3, 4, 5, 6, 7, 8, 9, 10 or more amino acid residue positions). In some embodiments, the reference sequence is selected from SEQ ID NOS: 2, 46, and/or 58.

[0110] In some embodiments, the KDCA polynucleotide encodes an engineered polypeptide having KDCA activity with the properties disclosed herein, wherein the polypeptide comprises an amino acid sequence having at least 80%, 85%, 86%, 87%, 88%, 89%, 90%, 91%, 92%, 93%, 94%, 95%, 96%, 97%, 98%, 99%, or more sequence identity to reference sequence SEQ ID NO: 2, 46, and/or 58, and one or more residue differences as compared to SEQ ID NO: 4, 46, and/or 58.

[0111] In some embodiments, the polynucleotide encoding the engineered KDCA polypeptides comprises a polynucleotide sequence selected from a polynucleotide sequence selected from SEQ ID NOS: 1, 45, and/or 57. In some embodiments, the polynucleotide encoding an engineered KDCA polypeptide has at least 80%, 85%, 90%, 93%, 95%, 96%, 97%, 98%, 99% nucleotide residue identity to SEQ ID NOS: 1, 45, and/or 57.

[0112] In some embodiments, the polynucleotides are capable of hybridizing under highly stringent conditions to a reference polynucleotide sequence selected from SEQ ID NOS: 2, 45, and/or 57, or a complement thereof, or a polynucleotide sequence encoding any of the variant KdcA polypeptides provided herein. In some embodiments, the polynucleotide capable of hybridizing under highly stringent conditions encodes a KDCA polypeptide comprising an amino acid sequence that has one or more residue differences as compared to SEQ ID NO: 2, 46, and/or 58.

[0113] In some embodiments, an isolated polynucleotide encoding any of the engineered KdcA polypeptides herein is manipulated in a variety of ways to facilitate expression of the KdcA polypeptide. In some embodiments, the polynucleotides encoding the KDCA polypeptides comprise expression vectors where one or more control sequences is present to regulate the expression of the KDCA polynucleotides and/or polypeptides. Manipulation of the isolated polynucleotide prior to its insertion into a vector may be desirable or necessary depending on the expression vector utilized. Techniques for modifying polynucleotides and nucleic acid sequences utilizing recombinant DNA methods are well known in the art. In some embodiments, the control sequences include among others, promoters, leader sequences, polyadenylation sequences, propeptide sequences, signal peptide sequences, and transcription terminators. In some embodiments, suitable promoters are selected based on the host cells selection. For bacterial host cells, suitable promoters for directing transcription of the nucleic acid constructs of the present disclosure, include, but are not limited to promoters obtained from the E. coli lac operon, Streptomyces coelicolor agarase gene (dagA), Bacillus subtilis levansucrase gene (sacB), Bacillus licheniformis alpha-amylase gene (amyL), Bacillus stearothermophilus maltogenic amylase gene (amyM), Bacillus amyloliquefaciens alpha-amylase gene (amyQ), Bacillus licheniformis penicillinase gene (penP), Bacillus subtilis xylA and xylB genes, and prokaryotic beta-lactamase gene (See e.g., Villa-Kamaroff et al., Proc. Natl Acad. Sci. USA 75:3727-3731 [1978]), as well as the tac promoter (See e.g., DeBoer et al., Proc. Natl Acad. Sci. USA 80: 21-25 [1983]). Exemplary promoters for filamentous fungal host cells, include, but are not limited to promoters obtained from the genes for Aspergillus oryzae TAKA amylase, Rhizomucor miehei aspartic proteinase, Aspergillus niger neutral alpha-amylase, Aspergillus niger acid stable alpha-amylase, Aspergillus niger or Aspergillus awamori glucoamylase (glaA), Rhizomucor miehei lipase, Aspergillus oryzae alkaline protease, Aspergillus oryzae triose phosphate isomerase, Aspergillus nidulans acetamidase, and Fusarium oxysporum trypsin-like protease (See e.g., WO 96/00787), as well as the NA2-tpi promoter (a hybrid of the promoters from the genes for Aspergillus niger neutral alpha-amylase and Aspergillus oryzae triose phosphate isomerase), and mutant, truncated, and hybrid promoters thereof. Exemplary yeast cell promoters can be from the genes can be from the genes for Saccharomyces cerevisiae enolase (ENO-1), Saccharomyces cerevisiae galactokinase (GAL1), Saccharomyces cerevisiae alcohol dehydrogenase/glyceraldehyde-3-phosphate dehydrogenase (ADH2/GAP), and Saccharomyces cerevisiae 3-phosphoglycerate kinase. Other useful promoters for yeast host cells are known in the art (See e.g., Romanos et al., Yeast 8:423-488 [1992]).

[0114] In some embodiments, the control sequence is also a suitable transcription terminator sequence (i.e., a sequence recognized by a host cell to terminate transcription). In some embodiments, the terminator sequence is operably linked to the 3′ terminus of the nucleic acid sequence encoding the KDCA polypeptide. Any suitable terminator which is functional in the host cell of choice finds use in the present invention. Exemplary transcription terminators for filamentous fungal host cells can be obtained from the genes for Aspergillus oryzae TAKA amylase, Aspergillus niger glucoamylase, Aspergillus nidulans anthranilate synthase, Aspergillus niger alpha-glucosidase, and Fusarium oxysporum trypsin-like protease. Exemplary terminators for yeast host cells can be obtained from the genes for Saccharomyces cerevisiae enolase, Saccharomyces cerevisiae cytochrome C (CYC1), and Saccharomyces cerevisiae glyceraldehyde-3-phosphate dehydrogenase. Other useful terminators for yeast host cells are known in the art (See e.g., Romanos et al., supra).

[0115] In some embodiments, the control sequence is also a suitable leader sequence (i.e., a non-translated region of an mRNA that is important for translation by the host cell). In some embodiments, the leader sequence is operably linked to the 5′ terminus of the nucleic acid sequence encoding the KDCA polypeptide. Any suitable leader sequence that is functional in the host cell of choice find use in the present invention. Exemplary leaders for filamentous fungal host cells are obtained from the genes for Aspergillus oryzae TAKA amylase, and Aspergillus nidulans triose phosphate isomerase. Suitable leaders for yeast host cells are obtained from the genes for Saccharomyces cerevisiae enolase (ENO-1), Saccharomyces cerevisiae 3-phosphoglycerate kinase, Saccharomyces cerevisiae alpha-factor, and Saccharomyces cerevisiae alcohol dehydrogenase/glyceraldehyde-3-phosphate dehydrogenase (ADH2/GAP).

[0116] In some embodiments, the control sequence is also a polyadenylation sequence (i.e., a sequence operably linked to the 3′ terminus of the nucleic acid sequence and which, when transcribed, is recognized by the host cell as a signal to add polyadenosine residues to transcribed mRNA). Any suitable polyadenylation sequence which is functional in the host cell of choice finds use in the present invention. Exemplary polyadenylation sequences for filamentous fungal host cells include, but are not limited to the genes for Aspergillus oryzae TAKA amylase, Aspergillus niger glucoamylase, Aspergillus nidulans anthranilate synthase, Fusarium oxysporum trypsin-like protease, and Aspergillus niger alpha-glucosidase. Useful polyadenylation sequences for yeast host cells are known (See e.g., Guo and Sherman, Mol. Cell. Bio., 15:5983-5990 [1995]).

[0117] In some embodiments, the control sequence is also a signal peptide (i.e., a coding region that codes for an amino acid sequence linked to the amino terminus of a polypeptide and directs the encoded polypeptide into the cell's secretory pathway). In some embodiments, the 5′ end of the coding sequence of the nucleic acid sequence inherently contains a signal peptide coding region naturally linked in translation reading frame with the segment of the coding region that encodes the secreted polypeptide. Alternatively, in some embodiments, the 5′ end of the coding sequence contains a signal peptide coding region that is foreign to the coding sequence. Any suitable signal peptide coding region which directs the expressed polypeptide into the secretory pathway of a host cell of choice finds use for expression of the engineered polypeptide(s). Effective signal peptide coding regions for bacterial host cells are the signal peptide coding regions include, but are not limited to those obtained from the genes for Bacillus NC1B 11837 maltogenic amylase, Bacillus stearothermophilus alpha-amylase, Bacillus licheniformis subtilisin, Bacillus licheniformis beta-lactamase, Bacillus stearothermophilus neutral proteases (nprT, nprS, nprM), and Bacillus subtilis prsA. Further signal peptides are known in the art (See e.g., Simonen and Palva, Microbiol. Rev., 57:109-137 [1993]). In some embodiments, effective signal peptide coding regions for filamentous fungal host cells include, but are not limited to the signal peptide coding regions obtained from the genes for Aspergillus oryzae TAKA amylase, Aspergillus niger neutral amylase, Aspergillus niger glucoamylase, Rhizomucor miehei aspartic proteinase, Humicola insolens cellulase, and Humicola lanuginosa lipase. Useful signal peptides for yeast host cells include, but are not limited to those from the genes for Saccharomyces cerevisiae alpha-factor and Saccharomyces cerevisiae invertase.

[0118] In some embodiments, the control sequence is also a propeptide coding region that codes for an amino acid sequence positioned at the amino terminus of a polypeptide. The resultant polypeptide is referred to as a “proenzyme,” “propolypeptide,” or “zymogen.” A propolypeptide can be converted to a mature active polypeptide by catalytic or autocatalytic cleavage of the propeptide from the propolypeptide. The propeptide coding region may be obtained from any suitable source, including, but not limited to the genes for Bacillus subtilis alkaline protease (aprE), Bacillus subtilis neutral protease (nprT), Saccharomyces cerevisiae alpha-factor, Rhizomucor miehei aspartic proteinase, and Myceliophthora thermophila lactase (See e.g., WO 95/33836). Where both signal peptide and propeptide regions are present at the amino terminus of a polypeptide, the propeptide region is positioned next to the amino terminus of a polypeptide and the signal peptide region is positioned next to the amino terminus of the propeptide region.

[0119] In some embodiments, regulatory sequences are also utilized. These sequences facilitate the regulation of the expression of the polypeptide relative to the growth of the host cell. Examples of regulatory systems are those that cause the expression of the gene to be turned on or off in response to a chemical or physical stimulus, including the presence of a regulatory compound. In prokaryotic host cells, suitable regulatory sequences include, but are not limited to the lac, tac, and trp operator systems. In yeast host cells, suitable regulatory systems include, but are not limited to the ADH2 system or GAL1 system. In filamentous fungi, suitable regulatory sequences include, but are not limited to the TAKA alpha-amylase promoter, Aspergillus niger glucoamylase promoter, and Aspergillus oryzae glucoamylase promoter.

[0120] In another aspect, the present invention is directed to a recombinant expression vector comprising a polynucleotide encoding an engineered KDCA polypeptide, and one or more expression regulating regions such as a promoter and a terminator, a replication origin, etc., depending on the type of hosts into which they are to be introduced. In some embodiments, the various nucleic acid and control sequences described herein are joined together to produce recombinant expression vectors which include one or more convenient restriction sites to allow for insertion or substitution of the nucleic acid sequence encoding the KDCA polypeptide at such sites. Alternatively, in some embodiments, the nucleic acid sequence of the present invention is expressed by inserting the nucleic acid sequence or a nucleic acid construct comprising the sequence into an appropriate vector for expression. In some embodiments involving the creation of the expression vector, the coding sequence is located in the vector so that the coding sequence is operably linked with the appropriate control sequences for expression.

[0121] The recombinant expression vector may be any suitable vector (e.g., a plasmid or virus), that can be conveniently subjected to recombinant DNA procedures and bring about the expression of the KDCA polynucleotide sequence. The choice of the vector typically depends on the compatibility of the vector with the host cell into which the vector is to be introduced. The vectors may be linear or closed circular plasmids.

[0122] In some embodiments, the expression vector is an autonomously replicating vector (i.e., a vector that exists as an extra-chromosomal entity, the replication of which is independent of chromosomal replication, such as a plasmid, an extra-chromosomal element, a minichromosome, or an artificial chromosome). The vector may contain any means for assuring self-replication. In some alternative embodiments, the vector is one in which, when introduced into the host cell, it is integrated into the genome and replicated together with the chromosome(s) into which it has been integrated. Furthermore, in some embodiments, a single vector or plasmid, or two or more vectors or plasmids which together contain the total DNA to be introduced into the genome of the host cell, and/or a transposon is utilized.

[0123] In some embodiments, the expression vector contains one or more selectable markers, which permit easy selection of transformed cells. A “selectable marker” is a gene, the product of which provides for biocide or viral resistance, resistance to heavy metals, prototrophy to auxotrophs, and the like. Examples of bacterial selectable markers include, but are not limited to the dal genes from Bacillus subtilis or Bacillus licheniformis, or markers, which confer antibiotic resistance such as ampicillin, kanamycin, chloramphenicol or tetracycline resistance. Suitable markers for yeast host cells include, but are not limited to ADE2, HIS3, LEU2, LYS2, MET3, TRP1, and URA3. Selectable markers for use in filamentous fungal host cells include, but are not limited to, amdS (acetamidase; e.g., from A. nidulans or A. orzyae), argB (ornithine carbamoyltransferases), bar (phosphinothricin acetyltransferase; e.g., from S. hygroscopicus), hph (hygromycin phosphotransferase), niaD (nitrate reductase), pyrG (orotidine-5′-phosphate decarboxylase; e.g., from A. nidulans or A. orzyae), sC (sulfate adenyltransferase), and trpC (anthranilate synthase), as well as equivalents thereof. In another aspect, the present invention provides a host cell comprising at least one polynucleotide encoding at least one engineered KDCA polypeptide of the present invention, the polynucleotide(s) being operatively linked to one or more control sequences for expression of the engineered KDCA enzyme(s) in the host cell. Host cells suitable for use in expressing the polypeptides encoded by the expression vectors of the present invention are well known in the art and include but are not limited to, bacterial cells, such as E. coli, Vibrio fluvialis, Streptomyces and Salmonella typhimurium cells; fungal cells, such as yeast cells (e.g., Saccharomyces cerevisiae or Pichia pastoris (ATCC Accession No. 201178)); insect cells such as Drosophila S2 and Spodoptera Sf9 cells; animal cells such as CHO, COS, BHK, 293, and Bowes melanoma cells; and plant cells. Exemplary host cells also include various Escherichia coli strains (e.g., W3110 (ΔfhuA) and BL21).

[0124] Accordingly, in another aspect, the present invention provides methods of producing the engineered KDCA polypeptides, where the methods comprise culturing a host cell capable of expressing a polynucleotide encoding the engineered KDCA polypeptide under conditions suitable for expression of the polypeptide. In some embodiments, the methods further comprise the steps of isolating and/or purifying the KDCA polypeptides, as described herein.

[0125] Appropriate culture media and growth conditions for host cells are well known in the art. It is contemplated that any suitable method for introducing polynucleotides for expression of the KDCA polypeptides into cells will find use in the present invention. Suitable techniques include, but are not limited to electroporation, biolistic particle bombardment, liposome mediated transfection, calcium chloride transfection, and protoplast fusion.

[0126] Engineered KDCA polypeptides with the properties disclosed herein can be obtained by subjecting the polynucleotide encoding the naturally occurring or engineered KDCA polypeptide to any suitable mutagenesis and/or directed evolution methods known in the art, and/or as described herein. An exemplary directed evolution technique is mutagenesis and/or DNA shuffling (See e.g., Stemmer, Proc. Natl. Acad. Sci. USA 91:10747-10751 [1994]; WO 95/22625; WO 97/0078; WO 97/35966; WO 98/27230; WO 00/42651; WO 01/75767 and U.S. Pat. No. 6,537,746). Other directed evolution procedures that can be used include, among others, staggered extension process (StEP), in vitro recombination (See e.g., Zhao et al., Nat. Biotechnol., 16:258-261 [1998]), mutagenic PCR (See e.g., Caldwell et al., PCR Methods Appl., 3:S136-S140 [1994]), and cassette mutagenesis (See e.g., Black et al., Proc. Natl. Acad. Sci. USA 93:3525-3529 [1996]).

[0127] Mutagenesis and directed evolution methods can be readily applied to KDCA-encoding polynucleotides to generate variant libraries that can be expressed, screened, and assayed. Any suitable mutagenesis and directed evolution methods find use in the present invention and are well known in the art (See e.g., U.S. Pat. Nos. 5,605,793, 5,811,238, 5,830,721, 5,834,252, 5,837,458, 5,928,905, 6,096,548, 6,117,679, 6,132,970, 6,165,793, 6,180,406, 6,251,674, 6,265,201, 6,277,638, 6,287,861, 6,287,862, 6,291,242, 6,297,053, 6,303,344, 6,309,883, 6,319,713, 6,319,714, 6,323,030, 6,326,204, 6,335,160, 6,335,198, 6,344,356, 6,352,859, 6,355,484, 6,358,740, 6,358,742, 6,365,377, 6,365,408, 6,368,861, 6,372,497, 6,337,186, 6,376,246, 6,379,964, 6,387,702, 6,391,552, 6,391,640, 6,395,547, 6,406,855, 6,406,910, 6,413,745, 6,413,774, 6,420,175, 6,423,542, 6,426,224, 6,436,675, 6,444,468, 6,455,253, 6,479,652, 6,482,647, 6,483,011, 6,484,105, 6,489,146, 6,500,617, 6,500,639, 6,506,602, 6,506,603, 6,518,065, 6,519,065, 6,521,453, 6,528,311, 6,537,746, 6,573,098, 6,576,467, 6,579,678, 6,586,182, 6,602,986, 6,605,430, 6,613,514, 6,653,072, 6,686,515, 6,703,240, 6,716,631, 6,825,001, 6,902,922, 6,917,882, 6,946,296, 6,961,664, 6,995,017, 7,024,312, 7,058,515, 7,105,297, 7,148,054, 7,220,566, 7,288,375, 7,384,387, 7,421,347, 7,430,477, 7,462,469, 7,534,564, 7,620,500, 7,620,502, 7,629,170, 7,702,464, 7,747,391, 7,747,393, 7,751,986, 7,776,598, 7,783,428, 7,795,030, 7,853,410, 7,868,138, 7,783,428, 7,873,477, 7,873,499, 7,904,249, 7,957,912, 7,981,614, 8,014,961, 8,029,988, 8,048,674, 8,058,001, 8,076,138, 8,108,150, 8,170,806, 8,224,580, 8,377,681, 8,383,346, 8,457,903, 8,504,498, 8,589,085, 8,762,066, 8,768,871, 9,593,326, 9,665,694, 9,684,771, and all related US and non-US counterparts; Ling et al., Anal. Biochem., 254(2):157-78 [1997]; Dale et al., Meth. Mol. Biol., 57:369-74 [1996]; Smith, Ann. Rev. Genet., 19:423-462 [1985]; Botstein et al., Science, 229:1193-1201 [1985]; Carter, Biochem. J., 237:1-7 [1986]; Kramer et al., Cell, 38:879-887 [1984]; Wells et al., Gene, 34:315-323 [1985]; Minshull et al., Curr. Op. Chem. Biol., 3:284-290 [1999]; Christians et al., Nat. Biotechnol., 17:259-264 [1999]; Crameri et al., Nature, 391:288-291 [1998]; Crameri, et al., Nat. Biotechnol., 15:436-438 [1997]; Zhang et al., Proc. Nat. Acad. Sci. U.S.A., 94:4504-4509 [1997]; Crameri et al., Nat. Biotechnol., 14:315-319 [1996]; Stemmer, Nature, 370:389-391 [1994]; Stemmer, Proc. Nat. Acad. Sci. USA, 91:10747-10751 [1994]; WO 95/22625; WO 97/0078; WO 97/35966; WO 98/27230; WO 00/42651; WO 01/75767; WO 2009/152336; and U.S. Pat. Appln. Publ. Nos. 2011/0082055, 2014/0005057, 2014/0214391, 2014/0221216, 2015/0133307, 2015/0134315, and 2015/0050658; all of which are incorporated herein by reference).

[0128] In some embodiments, the enzyme clones obtained following mutagenesis treatment are screened by subjecting the enzyme preparations to a defined temperature (or other assay conditions) and measuring the amount of enzyme activity remaining after heat treatments or other suitable assay conditions. Clones containing a polynucleotide encoding a KDCA polypeptide are then isolated from the gene, sequenced to identify the nucleotide sequence changes (if any), and used to express the enzyme in a host cell. Measuring enzyme activity from the expression libraries can be performed using any suitable method known in the art (e.g., standard biochemistry techniques, such as HPLC analysis).

[0129] For engineered polypeptides of known sequence, the polynucleotides encoding the enzyme can be prepared by standard solid-phase methods, according to known synthetic methods. In some embodiments, fragments of up to about 100 bases can be individually synthesized, then joined (e.g., by enzymatic or chemical litigation methods, or polymerase mediated methods) to form any desired continuous sequence. For example, polynucleotides and oligonucleotides disclosed herein can be prepared by chemical synthesis using the classical phosphoramidite method (See e.g., Beaucage et al., Tet. Lett., 22:1859-69 [1981]; and Matthes et al., EMBO J., 3:801-05 [1984]), as it is typically practiced in automated synthetic methods. According to the phosphoramidite method, oligonucleotides are synthesized (e.g., in an automatic DNA synthesizer, purified, annealed, ligated and cloned in appropriate vectors).

[0130] Accordingly, in some embodiments, a method for preparing the engineered KDCA polypeptide can comprise: (a) synthesizing a polynucleotide encoding a polypeptide comprising an amino acid sequence selected from the amino acid sequence of any variant as described herein, and (b) expressing the KDCA polypeptide encoded by the polynucleotide. In some embodiments of the method, the amino acid sequence encoded by the polynucleotide can optionally have one or several (e.g., up to 3, 4, 5, or up to 10) amino acid residue deletions, insertions and/or substitutions. In some embodiments, the amino acid sequence has optionally 1-2, 1-3, 1-4, 1-5, 1-6, 1-7, 1-8, 1-9, 1-10, 1-15, 1-20, 1-21, 1-22, 1-23, 1-24, 1-25, 1-30, 1-35, 1-40, 1-45, or 1-50 amino acid residue deletions, insertions and/or substitutions. In some embodiments, the amino acid sequence has optionally 1, 2, 3, 4, 5, 6, 7, 8, 9, 10, 11, 12, 13, 14, 15, 16, 17, 18, 19, 20, 21, 22, 23, 24, 25, 30, 30, 35, 40, 45, or 50 amino acid residue deletions, insertions and/or substitutions. In some embodiments, the amino acid sequence has optionally 1, 2, 3, 4, 5, 6, 7, 8, 9, 10, 11, 12, 13, 14, 15, 16, 18, 20, 21, 22, 23, 24, or 25 amino acid residue deletions, insertions and/or substitutions. In some embodiments, the substitutions are conservative or non-conservative substitutions.

[0131] The expressed engineered KDCA polypeptide can be evaluated for any desired improved property or combination of properties (e.g., activity, selectivity, stability, etc.) using any suitable assay known in the art, including but not limited to the assays and conditions described herein.

[0132] In some embodiments, any of the engineered KDCA polypeptides expressed in a host cell are recovered from the cells and/or the culture medium using any one or more of the well-known techniques for protein purification, including, among others, lysozyme treatment, sonication, filtration, salting-out, ultra-centrifugation, and chromatography.

[0133] Chromatographic techniques for isolation of the KDCA polypeptides include, among others, reverse phase chromatography, high-performance liquid chromatography, ion-exchange chromatography, hydrophobic-interaction chromatography, size-exclusion chromatography, gel electrophoresis, and affinity chromatography. Conditions for purifying a particular enzyme depends, in part, on factors such as net charge, hydrophobicity, hydrophilicity, molecular weight, molecular shape, etc., and will be apparent to those having skill in the art. In some embodiments, affinity techniques may be used to isolate the improved KDCA enzymes. For affinity chromatography purification, any antibody that specifically binds a KDCA polypeptide of interest may find use. For the production of antibodies, various host animals, including but not limited to rabbits, mice, rats, etc., are immunized by injection with a KDCA polypeptide, or a fragment thereof. In some embodiments, the KDCA polypeptide or fragment is attached to a suitable carrier, such as BSA, by means of a side chain functional group or linkers attached to a side chain functional group.

[0134] In some embodiments, the engineered KDCA polypeptide is produced in a host cell by a method comprising culturing a host cell (e.g., an E. coli strain) comprising a polynucleotide sequence encoding an engineered KDCA polypeptide as described herein under conditions conducive to the production of the engineered KDCA polypeptide and recovering the engineered KDCA polypeptide from the cells and/or culture medium. In some embodiments, the host cell produces more than one engineered KDCA polypeptide.

[0135] In some embodiments, the present invention provides a method of producing an engineered KDCA polypeptide comprising culturing a recombinant bacterial cell comprising a polynucleotide sequence encoding an engineered KDCA polypeptide having at least 85%, 90%, 95%, 96%, 97%, 98%, or 99% sequence identity to reference sequences SEQ ID NO: 2, 46, and/or 58, and one or more amino acid residue differences as compared to SEQ ID NO: 2, 46, and/or 58, as provided herein, under suitable culture conditions to allow the production of the engineered KDCA polypeptide and optionally recovering the engineered KDCA polypeptide from the culture and/or cultured bacterial cells. In some embodiments, the host cell produces more than one engineered KDCA polypeptide.

[0136] In some embodiments, once the engineered KDCA polypeptides are recovered from the recombinant host cells and/or culture medium, they are further purified by any suitable method(s) known in the art. In some additional embodiments, the purified KDCA polypeptides are combined with other ingredients and compounds to provide compositions and formulations comprising the engineered KDCA polypeptide as appropriate for different applications and uses (e.g., pharmaceutical compositions).

### Compositions:

[0137] The present invention provides engineered KDCA polypeptides suitable for use in numerous compositions. These compositions find use in many fields, including but not limited to pharmaceuticals, dietary/nutritional supplements, food, feed, and fine chemical production. For example, in some embodiments, the present invention provides food and/or feeds comprising at least one engineered KDCA variant and/or at least one polynucleotide sequence encoding at least one KDCA variant. In some embodiments, the present invention provides beverages comprising at least one engineered KDCA variant.

[0138] In some embodiments, the engineered KDCA variant in food, feed, and/or nutritional/dietary supplement is glycosylated. Furthermore, the engineered KDCA variants find use in any suitable edible enzyme delivery matrix. In some embodiments, the engineered KDCA variants are present in an edible enzyme delivery matrix designed for rapid dispersal of the KDCA variant within the digestive tract of an animal upon ingestion of the variant.

[0139] The present invention also provides engineered KDCA polypeptides suitable for use in production of fine chemicals and other industrially important compounds (See e.g., US Pat. Appln. Nos. 2013/0340119, 2013/0005012, and 2005/0260724, and WO 2012/122333).

### Pharmaceutical and Other Compositions:

[0140] The present invention provides engineered KDCA polypeptides suitable for use in pharmaceutical and other compositions, such as dietary/nutritional supplements.

[0141] Depending on the mode of administration, these compositions comprising a therapeutically effective amount of an engineered KDCA according to the invention are in the form of a solid, semi-solid, or liquid. In some embodiments, the compositions include other pharmaceutically acceptable components such as diluents, buffers, excipients, salts, emulsifiers, preservatives, stabilizers, fillers, and other ingredients. Details on techniques for formulation and administration are well known in the art and described in the literature.

[0142] In some embodiments, the engineered KDCA polypeptides are formulated for use in oral pharmaceutical compositions. Any suitable format for use in delivering the engineered KDCA polypeptides find use in the present invention, including but not limited to pills, tablets, gel tabs, capsules, lozenges, dragees, powders, soft gels, sol-gels, gels, emulsions, implants, patches, sprays, ointments, liniments, creams, pastes, jellies, paints, aerosols, chewing gums, demulcents, sticks, suspensions (including but not limited to oil-based suspensions, oil-in water emulsions, etc.), slurries, syrups, controlled release formulations, suppositories, etc. In some embodiments, the engineered KDCA polypeptides are provided in a format suitable for injection (i.e., in an injectable formulation). In some embodiments, the engineered KDCA polypeptides are provided in biocompatible matrices such as sol-gels, including silica-based (e.g., oxysilane) sol-gels. In some embodiments, the engineered KDCA polypeptides are encapsulated. In some alternative embodiments, the engineered KDCA polypeptides are encapsulated in nanostructures (e.g., nanotubes, nanotubules, nanocapsules, or microcapsules, microspheres, liposomes, etc.). Indeed, it is not intended that the present invention be limited to any particular delivery formulation and/or means of delivery. It is intended that the engineered KDCA polypeptides be administered by any suitable means known in the art, including but not limited to parenteral, oral, topical, transdermal, intranasal, intraocular, intrathecal, via implants, etc.

[0143] In some embodiments, the engineered KDCA polypeptides are chemically modified by glycosylation, pegylation (i.e., modified with polyethylene glycol [PEG] or activated PEG, etc.) or other compounds (See e.g., Ikeda, Amino Acids 29:283-287 [2005]; U.S. Pat. Nos. 7,531,341, 7,534,595, 7,560,263, and 7,553,653; US Pat. Appln. Publ. Nos. 2013/0039898, 2012/0177722, etc.). Indeed, it is not intended that the present invention be limited to any particular delivery method and/or mechanism.

[0144] In some additional embodiments, the engineered KDCA polypeptides are provided in formulations comprising matrix-stabilized enzyme crystals. In some embodiments, the formulation comprises a cross-linked crystalline engineered KDCA enzyme and a polymer with a reactive moiety that adheres to the enzyme crystals. The present invention also provides engineered KDCA polypeptides in polymers.

[0145] In some embodiments, compositions comprising the engineered KDCA polypeptides of the present invention include one or more commonly used carrier compounds, including but not limited to sugars (e.g., lactose, sucrose, mannitol, and/or sorbitol), starches (e.g., corn, wheat, rice, potato, or other plant starch), cellulose (e.g., methyl cellulose, hydroxypropylmethyl cellulose, sodium carboxy-methylcellulose), gums (e.g., arabic, tragacanth, guar, etc.), and/or proteins (e.g., gelatin, collagen, etc.). Additional components in oral formulations may include coloring and or sweetening agents (e.g., glucose, sucrose, and mannitol) and lubricating agents (e.g., magnesium stearate), as well as enteric coatings (e.g., methacrylate polymers, hydroxyl propyl methyl cellulose phthalate, and/or any other suitable enteric coating known in the art). In some embodiments, disintegrating or solubilizing agents are included (e.g., cross-linked polyvinyl pyrrolidone, agar, alginic acid or salts thereof, such as sodium alginate). In some embodiments, the engineered KdcA polypeptide are combined with various additional components, including but not limited to preservatives, suspending agents, thickening agents, wetting agents, alcohols, fatty acids, and/or emulsifiers, particularly in liquid formulations.

[0146] In some embodiments, the engineered KdcA polypeptide are be combined with various additional components, including but not limited to preservatives, suspending agents, thickening agents, wetting agents, alcohols, fatty acids, and/or emulsifiers, particularly in liquid formulations. In some embodiments, the engineered KdcA polypeptides are administered to subjects in combination with other compounds used in the treatment of MSUD, as well as any other suitable compounds.

[0147] In some embodiments, the present invention provides engineered KdcA polypeptides suitable for use in decreasing, ameliorating, or eliminating the signs and/or symptoms of MSUD. The dosage of engineered KdcA polypeptide(s) administered to a patient depends upon the genotype of the patient, the general condition of the patient, and other factors known to those in the art. In some embodiments, the compositions are intended for single or repeat administration to a patient. In some embodiments, it is contemplated that the concentration of engineered KdcA polypeptide(s) in the composition(s) administered to a patient is sufficient to effectively treat, ameliorate and/or prevent the symptoms of the disease. In some embodiments, the engineered KdcA polypeptides are administered in combination with other pharmaceutical and/or dietary compositions.

### Industrial Compositions:

[0148] It is contemplated that the engineered KdcA polypeptides of the present invention will find use in industrial compositions, including such areas as food flavorings (e.g., cheese; See, Smit et al., supra).

[0149] In some embodiments, the engineered KdcA polypeptides are formulated for use in the food and/or feed industries. In some embodiments, the engineered KdcA polypeptides are formulated in granulated or pelleted products which are mixed with animal feed components such as additional enzymes (for example, cellulases, laccases, and amylases). In some alternative embodiments, the engineered KDCA polypeptides are used in liquid animal feed compositions (e.g., aqueous or oil based slurries). Thus, in some embodiments, the engineered KdcA variants of the present invention are sufficiently thermotolerant and thermostable to withstand the treatment used to produce pellets and other processed feed/foods.

[0150] The foregoing and other aspects of the invention may be better understood in connection with the following non-limiting examples. The examples are provided for illustrative purposes only and are not intended to limit the scope of the present invention in any way.

### EXPERIMENTAL

[0151] The following Examples, including experiments and results achieved, are provided for illustrative purposes only and are not to be construed as limiting the present invention.

[0152] In the experimental disclosure below, the following abbreviations apply: ppm (parts per million); M (molar); mM (millimolar), uM and μM (micromolar); nM (nanomolar); mol (moles); gm and g (gram); mg (milligrams); ug and μg (micrograms); L and 1 (liter); ml and mL (milliliter); cm (centimeters); mm (millimeters); um and um (micrometers); sec. (seconds); min(s) (minute(s)); h(s) and hr(s) (hour(s)); U (units); MW (molecular weight); rpm (rotations per minute); psi and PSI (pounds per square inch); ° C. (degrees Centigrade); RT and rt (room temperature); CDS (coding sequence); DNA (deoxyribonucleic acid); RNA (ribonucleic acid); AUC (area under the curve); E. coli W3110 (commonly used laboratory E. coli strain, available from the Coli Genetic Stock Center [CGSC], New Haven, Conn.); HTP (high throughput); HPLC (high pressure liquid chromatography); LC (liquid chromatography); MS (mass spectroscopy); CFSE (carboxyfluorescein succinimidyl ester); KIC (ketoisocaproate); IPTG (isopropyl β-D-1-thiogalactopyranoside); PES (polyethersulfone); BSA (bovine serum albumin); PBMC (peripheral blood mononuclear cells); MSUD (maple syrup urine disease); MHC (major histocompatibility complex); HLA (human leukocyte antigen); HLA-DR (an MHC Class II cell surface receptor encoded by the HLA complex on chromosome #6); FIOPC (fold improvements over positive control); LB (Luria broth); TB (Terrific broth); Innovative Research (Innovative Research, Novi, Mich.); Microfluidics (Microfluidics Corp., Newton, Mass.); Thermotron (Thermotron, Holland, Mich.); Infors (Infors AG, Bottmingen, Switzerland); Waters (Waters Corp., Milford, Mass.); Infors (Infors AG, Bottmingen, Switzerland); Coriell Institute for Medical Research (Coriell Institute for Medical Research, Camden, N.J.); GE Healthcare (GE Healthcare Bio-Sciences, Pittsburgh, Pa.); Sigma-Aldrich (Sigma-Aldrich, St. Louis, Mo.); Applied Biosystems (Applied Biosystems, part of Life Technologies, Corp., Grand Island, N.Y.), Agilent (Agilent Technologies, Inc., Santa Clara, Calif.); Thermo Scientific (part of Thermo Fisher Scientific, Waltham, Mass.); Gibco (Gibco part of Thermo Fisher Scientific, Waltham, Mass.); Corning (Corning, Inc., Palo Alto, Calif.); and AB Sciex (AB Sciex, Framingham, Mass.).

### Example 1

### KdcA Gene Acquisition and Construction of Expression Vectors

[0153] A synthetic gene (SEQ ID NO: 1) encoding the branched-chain keto acid decarboxylase (kdcA) from Lactococcus lactis (SEQ ID NO: 2) was synthesized with codon optimization for expression in E. coli. The synthetic kdcA gene (SEQ ID NO: 1) was cloned into the E. coli expression vector pCK100900i (See, U.S. Pat. No. 9,714,437, which is hereby incorporated by reference). This plasmid construct was transformed into an E. coli strain derived from W3110. Directed evolution techniques generally known by those skilled in the art were used to generate libraries of gene variants from this plasmid construct (See e.g., U.S. Pat. No. 8,383,346 and WO2010/144103) as well as KdcA derivatives.

### Example 2

### Preparation of HTP KdcA-Containing Cell Lysates

[0154] To lyse the cells, 200 μl lysis buffer containing 50 mM KiPO4, pH 6.5, 1 mg/mL lysozyme, and 0.5 mg/mL PMBS was added to the cell paste. The cells were incubated at room temperature for 1.5 hours with shaking on a bench top shaker. The plate was then centrifuged for 15 minutes at 4000 rpm and 4° C.

### Example 3

### Preparation of Lyophilized Lysates from Shake Flask (SF) Cultures

[0155] A single colony containing the desired gene picked from an LB agar plates with 1% glucose and 30 μg/ml CAM, and incubated overnight at 37° C. was transferred to 6 ml of LB with 1% glucose and 30 μg/ml CAM. The culture was grown for 18 h at 30° C., 250 rpm, and subcultured approximately 1:50 into 250 ml of TB containing 30 μg/ml CAM, to a final OD₆₀₀ of about 0.05. The subculture was grown for approximately 195 minutes at 30° C., 250 rpm, to an OD₆₀₀ between 0.6-0.8, and induced with 1 mM IPTG. The subculture was then grown for 20 h at 30° C., 250 rpm. The subculture was centrifuged at 4000 rpm for 20 min. The supernatant was discarded, and the pellet was resuspended in 35 ml of 50 mM potassium phosphate buffer, pH 6.5, 2.5 mM magnesium sulfate, and 0.1 mM thiamine pyrophosphate. The cells were lysed using a MICROFLUIDIZER® processor system (Microfluidics) at 18,000 psi. The lysate was pelleted (10,000 rpm×60 min) at 4° C., and the supernatant was frozen and lyophilized to generate shake flake (SF) enzyme powder.

### Example 4

### KdcA Variants with Improved Activity and Serum Stability Relative to SEQ ID NO: 2

[0156] The wild type KdcA (SEQ ID NO: 2) was chosen as the parent enzyme. Libraries of engineered genes were produced using well-established techniques (e.g., saturation mutagenesis, and recombination of previously identified beneficial mutations). The polypeptides encoded by each gene were produced in HTP as described in Example 1, and the clarified lysates were generated as described in Example 2.

[0157] For HTP activity assays, 10 μL of the clarified supernatant from the lysis as described in Example 2 were added to 240 μL of 50 mM KiPO4, pH 6.5 (25× dilution) and the diluted lysates were used in subsequent biocatalytic reactions described below. HTP reactions were carried out in 96 well plates containing 100 μL of 50 mM KiPO4, pH 6.5, 80% of pooled normal human AB serum (Innovative Research; cat IPLA-SERAB), 400 μM ketoisocaproate (KIC) and 10 μl of above diluted HTP supernatant. The HTP plates were incubated in a THERMOTRON® shaker (3 mm throw, model # AJ185, Infors) at 37° C., 200 rpm, for 2 hours. 20 μL of the reaction mixture was transferred to a 96 well plate and quenched with 180 μl of 0.1% formic acid in acetonitrile containing 50 μM d3-KIC (used as an internal control) and mixed for 5 minutes using a bench top shaker. The plates were then centrifuged at 4000 rpm for 5 minutes and supernatant was loaded to LC-MS instrument. Mass signal of KIC substrate and internal control d3-KIC was analyzed.

[0158] Activity relative to SEQ ID NO: 2 was reported as fold improvement over positive control (FIOP), which is calculated as the normalized mass signal of KIC by d3-KIC in the corresponding backbone per the normalized mass signal of KIC by d3-KIC in the product under the specified reaction conditions. Active variants and their associated FIOP values relative to SEQ ID NO: 2 are listed in Table 4.1.

[0159] Beneficial mutations were identified in variants from HTP assays and subsequently another library of engineered genes was produced using well-established techniques (e.g., saturation mutagenesis, and recombination of previously identified beneficial mutations). These engineered genes have the same parent (SEQ ID NO: 2) as those described in Table 4.1. For HTP activity assays with these variants, a more stringent serum challenge assay was implemented, in which variants were pre-incubated with serum for 1 h before activity was measured. Briefly, 20 uL of the clarified supernatant from the lysis as described in Example 2 was added to 180 uL of 50 mM KiPO4, pH 6.5 (10× dilution) and the diluted lysates were used in subsequent biocatalytic reactions. HTP reactions were carried out in 96 well plates. Then, 10 uL of the above diluted HTP lysate was pre-exposed to 80 uL of pooled normal human AB serum (Innovative Research, IPLA-SERAB; this serum was used in all of the Examples herein in which serum was utilized) for 1 hr at 37° C. Then, 10 uL of 40 mM stock KIC in 50 mM KiPO4, pH 6.5 were added to the well, to produce a final total of 100 uL of reaction mixture containing 4 mM of KIC and 80% of serum in the wells. The HTP plates were incubated in THERMOTRON® shaker (3 mm throw, model # AJ185, Infors) at 37° C., 200 rpm, for another hour. Then, 20 uL of the reaction mixture were transferred to a 96 well plate and quenched with 180 μl of 0.1% formic acid in acetonitrile containing 10 uM d3-KIC (used as an internal control) and mixed for 5 minutes using a bench top shaker. The plates were then centrifuged at 4000 rpm for 5 minutes and supernatant was loaded to LC-MS instrument. Mass signal of KIC substrate and internal control d3-KIC were analyzed. Active variants and their associated FIOP values relative to SEQ ID NO: 2 are listed in Table 4.2

TABLE 4.1
Activity of kdcA Variants (Relative to SEQ ID NO: 2)

| SEQ ID NO: | Amino Acid Differences | Primary FIOP by KIC/KIC-d3 |
|---|---|---|
| (nt/aa) | (Relative to SEQ ID NO: 2) | (Relative to SEQ ID NO: 2)¹ |
| 1/2 | | + |
| 3/4 | S471P | +++ |
| 5/6 | N28F | + |
| 7/8 | L153A/I264E | ++ |
| 9/10 | M124E/S442A | ++ |
| 11/12 | S37A | + |
| 13/14 | R500I | + |
| 15/16 | S442A | ++ |
| 17/18 | L153A/S442A | +++ |
| 19/20 | S355L | +++ |
| 21/22 | E329K | + |
| 23/24 | Q437S | + |
| 25/26 | F388P | ++ |
| 27/28 | E174D/I453T | +++ |
| 29/30 | Y144P/S184N | + |
| 31/32 | K419D | + |
| 33/34 | K510F | + |
| 35/36 | K121L/K331S | ++ |

¹Levels of increased activity were determined relative to the reference polypeptide of SEQ ID NO: 2, and defined as follows:
““+”” = 1.00 to 1.10 (first 50%);
““++”” > 1.10 (next 30%); and
““+++”” > 1.19 (top 20%).

TABLE 4.2
Activity of kdcA Variants Relative to SEQ ID NO: 2

| | | FIOP by KIC/d3-KIC |
|---|---|---|
| | | (Pre-Serum Exposure, |
| SEQ ID | | Followed by 4 mM |
| NO: | Amino Acid Differences | KIC Challenge) (Relative |
| (nt/aa) | (Relative to SEQ ID NO: 2) | to SEQ ID NO: 2)¹ |
| 1/2 | | + |
| 37/38 | S37A/Y144T/S442A | + |
| 39/40 | T187L/Q338E/F388P/S442A | ++ |
| 41/42 | S37A/Y144T/T187L | + |
| 43/44 | S37A/S442A | ++ |
| 45/46 | S37A/Y144T/T187L/S286I/S442A | +++ |

¹Levels of increased activity were determined relative to the reference polypeptide of SEQ ID NO: 2, and defined as follows:
““+”” = 1.00 to 1.17 (first 50%),
““++”” > 1.17 (next 30%); and
““+++”” > 1.28 (top 20%).

### Example 5

### KdcA Variants with Improved Activity and Serum Stability Relative to SEQ ID NO: 46

[0160] The kdcA variant SEQ ID NO: 46 was chosen as the parent enzyme. Libraries of engineered genes were produced using well-established techniques (e.g., saturation mutagenesis, and recombination of previously identified beneficial mutations). The polypeptides encoded by each gene were produced in HTP as described in Example 1, and the clarified lysates were generated as described in Example 2.

[0161] For HTP assays, 10 uL of the clarified supernatant from the lysis prepared as described in Example 2 were added to 240 uL of 50 mM KiPO4, pH 6.5 (25× dilution) and the diluted lysates were used in subsequent biocatalytic reactions. HTP reactions were carried out as described in Example 4. Fold improvement over positive control (FIOP) is calculated as the normalized mass signal of KIC by d3-KIC in the corresponding backbone per the normalized mass signal of KIC by d3-KIC in the product under the specified reaction conditions. Active variants with corresponding fold-improvement over positive control (FIOP) relative to SEQ ID NO: 46 are listed in Table 5.1.

TABLE 5.1
Activity of kdcA Variants Relative to SEQ ID NO: 46

| | | FIOP by |
|---|---|---|
| SEQ ID | | KIC/KIC-d3 |
| NO: | Amino Acid Differences | (Relative to SEQ |
| (nt/aa) | (Relative to SEQ ID NO: 46) | ID NO: 46)¹ |
| 45/46 | | + |
| 47/48 | D107R/M124W/I348D/F388P/S471P | + |
| 49/50 | D107R/K260S/S328N/S471P | +++ |
| 51/52 | D107R/S328N/K331L/F388P/S471P | +++ |
| 53/54 | D107R/M124W/K233H/K260S/S325F/S328N/K331L/S355L/F388P/ | ++ |
| | S471P | |
| 55/56 | D107R/M124W/S471P | ++ |
| 57/58 | D107R/E183Y/S185P/K233R/S328N/K331L/S351V/F388P/K419D/ | + |
| | S471P | |
| 59/60 | D107R/S355L/S471P | +++ |
| 61/62 | D107R/F388P/S471P | + |
| 63/64 | D107R/E183Y/K233H/K260S/S328N/I348D/S351V/S471P | + |
| 65/66 | Q338E/K342R/S471P | ++ |
| 67/68 | D107R/E183Y/K233H/K260S/K331L/K419D/S471P | + |
| 69/70 | K42R/N204W/S328L/K342R/Q437S/S471P | + |
| 71/72 | M124R/L136H/N204W/S355M/Q437S/S471P | +++ |
| 73/74 | S328N/S471P | + |
| 75/76 | D107R/K233H/K260S/S328N/I348D/S351V/F388P/S471P | +++ |
| 77/78 | K42R/R321S/S471P | + |
| 79/80 | D107R/K233H/K260S/S328N/K331L/S351V/S471P | + |
| 81/82 | D107R/S185P/I348D/S351V/F388P/S471P | ++ |
| 83/84 | Q338E/K342R/S355L/S471P | + |
| 85/86 | S185P/S471P | ++ |
| 87/88 | D107R/S325F/S328N/I348D/F388P/S471P | ++ |
| 89/90 | M124W/K260S/K331L/S355L/K446R/S471P | + |
| 91/92 | M124R/L136H/S328L/K331T/S355M/Q437S/S471P/K510F | ++ |
| 93/94 | K42R/S328L/S471P | + |
| 95/96 | F388P/S471P | + |
| 97/98 | Q338E/K342R/S471P/K510F | + |
| 99/100 | L136H/N204W/S328L/K331N/S355M/Q437S/S471P | + |
| 101/102 | D107R/E183Y/I348D/S351V/S471P | + |
| 103/104 | K42R/M124R/L136H/N204W/R321S/S328L/Q437S/S471P/K510F | + |
| 105/106 | M124R/S355M/S471P | ++ |
| 107/108 | L136H/K331T/Q338E/K342R/S471P | + |
| 109/110 | D107R/S185P/K233H/S328N/S351V/F388P/S471P | ++ |
| 111/112 | S328L/K331T/S355M/S471P | + |
| 113/114 | M124R/K331T/K342R/S355L/S471P | +++ |
| 115/116 | K42R/M124R/N204W/R321S/S471P | + |
| 117/118 | N204W/R321S/Q338E/S471P | +++ |
| 119/120 | D107R/E183Y/K260S/S328N/I348D/S351V/S471P | ++ |
| 121/122 | D107R/E183Y/K233R/K260S/S328N/I348D/S351V/F388P/S471P | +++ |
| 123/124 | M124W/S325F/K331L/S471P | + |
| 125/126 | M124R/L136H/R321S/S355L/S471P | + |
| 127/128 | K42R/S355M/S471P/K510F | + |
| 129/130 | K42R/M124R/L136H/N204W/Q437S/S471P | + |
| 131/132 | K42R/M124R/N204W/S471P | + |
| 133/134 | R321S/S328L/K331T/S471P | +++ |
| 135/136 | E183Y/K233H/S351V/F388P/S471P | + |
| 137/138 | M124R/Q338E/K342R/S471P | ++ |
| 139/140 | K42R/R321S/K331N/Q437S/S471P | + |
| 141/142 | S351V/S471P | + |
| 143/144 | K42R/M124R/R321S/S355M/S471P | ++ |
| 145/146 | M124W/S325F/S471P | + |
| 147/148 | K42R/N204W/R321S/S355M/Q437S/S471P/K510F | + |
| 149/150 | K42R/M124R/L136H/K331N/Q437S/S471P | + |
| 151/152 | K233H/K331L/F388P/K446R/S471P | + |
| 153/154 | K342R/S355L/Q437S/S471P | ++ |
| 155/156 | K42R/M124R/L136H/N204W/Q437S/S471P/K510F | +++ |
| 157/158 | M124R/L136H/S471P | + |
| 159/160 | D107R/S328N/K331L/S471P | ++ |
| 161/162 | K42R/L136H/S355M/S471P/K510F | + |
| 163/164 | L136H/R321S/S471P/K510F | + |
| 165/166 | S185P/K233H/K260S/S328N/K331L/K419D/S471P | + |
| 167/168 | D107R/K233H/I348D/S471P | ++ |
| 169/170 | M124R/K331N/Q338E/K342R/S355L/S471P | +++ |
| 171/172 | M124R/S328L/K331T/Q338E/S471P | ++ |
| 173/174 | L136H/N204W/Q437S/S471P | + |
| 175/176 | K42R/L136H/S328L/K331T/S471P | ++ |
| 177/178 | K42R/R321S/Q437S/S471P | + |
| 179/180 | K233H/S325F/S328N/K331L/I348D/S355L/S471P | + |
| 181/182 | M124R/L136H/K331N/S471P | ++ |
| 183/184 | D107R/I348D/F388P/S471P | +++ |
| 185/186 | S325F/S328N/K331L/I348D/S355L/F388P/S471P | ++ |
| 187/188 | L136H/Q437S/S471P | ++ |
| 189/190 | K42R/L136H/N204W/R321S/S328L/K331N/S355L/S471P | ++ |
| 191/192 | D107R/S325F/K331L/K446R/S471P | ++ |
| 193/194 | K260S/S325F/K331L/K446R/S471P | + |
| 195/196 | S325F/S328N/I348D/S355L/F388P/S471P | ++ |
| 197/198 | K42R/L136H/N204W/S328L/K331T/S355L/S471P | +++ |
| 199/200 | K42R/S471P | +++ |
| 201/202 | D107R/I348D/S355L/F388P/K446R/S471P | +++ |
| 203/204 | S185P/S328N/K331L/S471P | + |
| 205/206 | S325F/K331L/F388P/S471P | + |
| 207/208 | S325F/K331L/K446R/S471P | + |
| 209/210 | D107R/S325F/S328N/I348D/K446R/S471P | +++ |
| 211/212 | M124R/R321S/K331T/K342R/S471P/K510F | ++ |
| 213/214 | K42R/N204W/R321S/S328L/K342R/S355L/S471P/K510F | + |
| 215/216 | D107R/E183Y/K233R/K260S/K331L/I348D/S351V/K419D/S471P | ++ |
| 217/218 | K342R/S355M/S471P | ++ |
| 219/220 | D107R/M124W/K233H/S355L/K446R/S471P | ++ |
| 221/222 | M124R/R321S/S328L/S471P/K510F | +++ |

¹Levels of increased activity were determined relative to the reference polypeptide of SEQ ID NO: 58, and defined as follows:
““+”” = 1.00 to 1.49 (first 50%);
““++”” > 1.49 (next 30%); and
““+++”” > 1.84 (top 20%).

### Example 6

### KdcA Variants with Improved Activity and Serum Stability Relative to SEQ ID NO: 58

[0162] The kdcA variant SEQ ID NO: 58 was chosen as the parent enzyme. Libraries of engineered genes were produced using well-established techniques (e.g., saturation mutagenesis, and recombination of previously identified beneficial mutations). The polypeptides encoded by each gene were produced in HTP as described in Example 1, and the clarified lysates were generated as described in Example 2.

[0163] For HTP assays, 80 uL of the clarified supernatant from the lysis as described in Example 2 were added to 160 uL of 50 mM KiPO4, pH 6.5 (3× dilution) and the diluted lysates were used in the subsequent biocatalytic reactions described below. HTP reactions were carried out in 96 well plates containing 100 μL of 50 mM KiPO4, pH 6.5, 80% of human serum, 1.5 mM KIC, and 10 μl of above diluted HTP supernatant. The HTP plates were incubated in THERMOTRON® shakers (3 mm throw, model # AJ185, Infors) at 37° C., 200 rpm, for 1 hour. Then, 20 uL of the reaction mixture was transferred to a 96 well plate and quenched with 180 μl of 0.1% formic acid in acetonitrile containing 50 uM d3-KIC (used as an internal control) and mixed for 5 minutes using a bench top shaker. The plates were then centrifuged at 4000 rpm for 5 minutes and supernatant was loaded to LC-MS instrument. Mass signal of KIC substrate and internal control d3-KIC were analyzed. Active variants with corresponding fold-improvement over positive control (FIOP) relative to SEQ ID NO: 58 are listed in Table 6.1. FIOP is calculated as the normalized mass signal of KIC by d3-KIC in the corresponding backbone per the normalized mass signal of KIC by d3-KIC in the product under the specified reaction conditions.

[0164] Some variants were tested with a more stringent serum challenge assay, previously described in Example 4 with some modifications. In these HTP assays, 80 uL of the clarified supernatant from the lysis as described in Example 2 was added to 160 uL of 50 mM KiPO4, pH 6.5 (3× dilution) and the diluted lysates were used in subsequent biocatalytic reactions described below. HTP reactions were carried out in 96 well plates. In these assays, 10 uL of the above diluted HTP lysate were pre-exposed to 80 uL of human serum for 1 hr at 37° C., and followed by adding 10 uL of 40 mM stock KIC in 50 mM KiPO4, pH 6.5 to final total of 100 uL of reaction mixture containing 4 mM of KIC and 80% of human serum. The HTP plates were incubated in THERMOTRON® shakers (3 mm throw, model # AJ185, Infors) at 37° C., 200 rpm, for another hour. Then, 20 uL of the reaction mixture were transferred to a 96 well plate and quenched with 180 μl of 0.1% formic acid in acetonitrile containing 10 uM d3-KIC (used as an internal control) and mixed for 5 minutes using a bench top shaker. The plates were then centrifuged at 4000 rpm for 5 minutes and supernatant was loaded to LC-MS instrument. Mass signal of KIC substrate and internal control d3-KIC were analyzed. Active variants with corresponding fold-improvement over positive control (FIOP) relative to SEQ ID NO: 58 are listed in Table 6.2. FIOP is calculated as the normalized mass signal of KIC by d3-KIC in the corresponding backbone per the normalized mass signal of KIC by d3-KIC in the product under the specified reaction conditions.

TABLE 6.1
Activity of kdcA Variants Relative to SEQ ID NO: 58

| SEQ ID | | FIOP by KIC/KIC-d3 |
|---|---|---|
| NO: | Amino Acid Differences | (Relative to |
| (nt/aa) | (Relative to SEQ ID NO: 58) | SEQ ID NO: 58)¹ |
| 57/58 | | + |
| 223/224 | E529W | +++ |
| 225/226 | E529R | +++ |
| 227/228 | S507A | +++ |
| 229/230 | E334L | +++ |
| 231/232 | E527G | +++ |
| 233/234 | E529C | +++ |
| 235/236 | Q368E | +++ |
| 237/238 | V314T | +++ |
| 239/240 | E527R | +++ |
| 241/242 | S507A | ++ |
| 243/244 | E529N | ++ |
| 245/246 | S369A | ++ |
| 247/248 | E334L | ++ |
| 249/250 | N392M | ++ |
| 251/252 | T189E | ++ |
| 253/254 | V516A | ++ |
| 255/256 | E346V | ++ |
| 257/258 | N392A | ++ |
| 259/260 | N392G | ++ |
| 261/262 | V314S | ++ |
| 263/264 | S249A | ++ |
| 265/266 | E18D/T189E/V193E/K260S/N328L | ++ |
| 267/268 | S507G | + |
| 269/270 | V314A | + |
| 271/272 | N392G | + |
| 273/274 | N392S | + |
| 275/276 | S369M | + |
| 277/278 | E346V | + |
| 279/280 | S369T | + |
| 281/282 | E511L | + |
| 283/284 | S369R | + |
| 285/286 | E346R | + |
| 287/288 | S369T | + |
| 289/290 | E511K | + |
| 291/292 | N392R | + |
| 293/294 | E334D | + |
| 295/296 | S369A | + |
| 297/298 | S179V | + |
| 299/300 | E334Q | + |
| 301/302 | S507K | + |
| 303/304 | E511V | + |
| 305/306 | E334G | + |
| 307/308 | T189E/K203Q | + |

¹Levels of increased activity were determined relative to the reference polypeptide of SEQ ID NO: 58, and defined as follows:
““+”” = 1.00 to 1.49 (first 50%);
““++”” > 1.49 (next 30%); and
““+++”” > 1.84 (top 20%).

TABLE 6.2
Activity of kdcA Variants Relative to SEQ ID NO: 58

| SEQ | | FIOP by KIC/KIC-d3 |
|---|---|---|
| ID NO: | Amino Acid Differences | in serum 1 hr |
| (nt/aa) | (Relative to SEQ ID NO: 58) | (Relative to SEQ ID NO: 58)¹ |
| 57/58 | | + |
| 309/310 | K203Q | + |
| 311/312 | T189E/V193A/K342R/E527D | + |
| 313/314 | L295F | +++ |
| 315/316 | H13K/E18D | + |

¹Levels of increased activity were determined relative to the reference polypeptide of SEQ ID NO: 58, and defined as follows:
““+”” = 1.00 to 1.5; and
““++”” > 1.5.

### Example 7

### Extracellular MC Depletion by Purified KdcA Variants Using In Vitro MSUD Patient-Derived Fibroblast Cells

[0165] N-terminal His-tag including 6 histidine amino acids was constructed into three KdcA variants (SEQ ID NO: 2, SEQ ID NO: 46, and SEQ ID NO: 58) (L. lactis). Crude lysate of these variants were obtained as described in Example 3. Purification of the lysate was carried out in HisPur™ Ni-NTA column (ThermoFisher Scientific, cat #88229) in ÄKTA Start Chromatograph System (GE Healthcare), per the manufacturer's instructions. The purified KdcA variants harvested from the column were further purified by removal of endotoxin using standard protocols known in the art. The purified, endotoxin-free KdcA variants were stored in 50 mM potassium phosphate buffer, pH 6.5, 2.5 mM magnesium sulfate, and 0.1 mM thiamine pyrophosphate. The protein concentrations were calculated from a BSA standard curve, as known in the art.

[0166] The extracellular levels of KIC in MSUD fibroblast cells treated by the purified and endotoxin free KdcA variants (SEQ ID NO: 46 and SEQ ID NO: 58) described above were compared to a reference enzyme (His-tagged purified and endotoxin-free WT KdcA; SEQ ID NO: 2). In addition, the KdcA in vitro efficacies of these variants were determined. Normal fibroblast cells (GM00730; these cells were obtained from the NIGMS Human Genetic Cell Repository at the Coriell Institute for Medical Research) and MSUD patient-derived fibroblast cells (GM00297; Coriell Institute for Medical Research) were seeded at 10,000 cell/well into a 96-well plate with 200 uL of supplemented Minimal Essential Media (MEM; Gibco #11095-080, with 1% non-essential amino acids [NEAA; Gibco #11140-050], and 15% fetal bovine serum [Corning #35-016-CV]) and allowed to grow at 37° C. with 5% CO₂. After 24 hr growth, 50 ul of medium was sampled from each well and used as Day 1 samples. The rest of the medium was removed, and replaced with fresh MEM medium with FBS and NEAA with or without 0.005 mg/mL of the three KdcA variants (n=3), added at 200 uL/well. Then, 50 uL/well of medium was sampled (stored at −20° C.), and 50 ul of fresh medium was added each following day for three days. To measure the sample KIC level, a 20 uL aliquot of the collected samples was quenched by 0.1% formic acid in acetonitrile with 10 uM of d3-KIC. The KIC and d3-KIC levels were analyzed by LC-MS, as described in Example 10. The KIC levels in the samples were interpreted as KIC/d3-KIC. FIG. 1 provides a graph of the extracellular level of KIC observed in in normal fibroblast and MSUD fibroblast cells treated with the three KdcA variants.

### Example 8

### Serum Pharmacokinetics of Purified KdcA Variants

[0167] Purified and endotoxin-free KdcA variants produced as described in Example 7, were assessed for stability in the serum of live rats. WT KdcA (SEQ ID NO:2) or SEQ ID NO:46 stock (6.6 mg/ml in 50 mM potassium phosphate buffer, pH 6.5, 2.5 mM magnesium sulfate, and 0.1 mM thiamine pyrophosphate) were administered intravenously at adjusted volumes, to achieve 4.6 mg/kg to naïve jugular vein cannulated Sprague-Dawley rats (7-8 weeks old; n=4 per group). Prior to administration and at 5, 15, 30, 60, 120, 240, 360 minutes post-administration, 300 μL of blood was collected from each rat in an EDTA tube and centrifuged at 4° C. and 6000 rpm to generate ˜250 μL of plasma per sample. Samples were frozen and stored on dry ice prior to analysis. For analysis, a 40 μL aliquot of plasma was mixed with 5 μL of stock KIC (2 M, in 10× assay buffer containing 50 mM KiPO4, pH 7, 0.1 mM thiamine pyrophosphate, 2.5 mM MgCl₂) at final concentration of 200 mM, and 5 μL of assay buffer to make final volume of 50 μL, and incubated at room temperature for 2h. Samples were quenched with ethyl acetate at ˜40× dilution factor. After centrifugation, the supernatants were analyzed by gas chromatography for 3-methylbutanal quantification. The peak area of 3-methylbutanal was calculated as an indication of KdcA enzyme activity for each plasma sample. The total amount of enzyme activity injected to each rat was accessed similarly by assaying the variant stock solution (6.6 mg/mL) using rat plasma collected prior to administration and the same KIC and buffer condition. The percentage of injected dose per mL (% inj/mL) was determined by the enzyme activity in each rat plasma sample normalized by the total amount of activity injected per rat. The plasma clearance profiles demonstrated a longer plasma half-life on SEQ ID NO: 46 than that of WT KdcA SEQ ID NO: 2 (See, FIG. 2).

### Example 9

### Analytic Detection of KIC

[0168] Data described in Examples 5-7 were collected using analytical methods described for Tables 4.1, 4.2, 5.1, 6.1, and 6.2 and FIG. 1. The methods provided herein all find use in analyzing the variants produced using the present invention. Samples for LC analysis were prepared as dilutions in 0.1% formic acid in acetonitrile. The dilution level was dependent upon the starting conditions for the assay. Analysis of reaction samples was completed using an ACQUITY® Ultra Performance Liquid Chromatography system (Waters) equipped with a binary pump and tunable UV detector (TUV UV detector) and 3200 QTRAP® mass spectrometer (AB Sciex). For each run, 10 μL of quenched reaction supernatant was injected onto an ECLIPSE™ C18 column (50×4.6 mm, 1.8μ; Agilent) kept at a constant temperature of 30° C. Samples were eluted with water (buffer A) and acetonitrile (buffer B) with a constant flow rate of 0.75 mL/min. The following gradient was used: time 0 minutes, 50% buffer B; time 0.9 minutes, 90% buffer B; time 1.2 minutes, 90% buffer B; time 1.25 minutes, 50% buffer B; hold 50% buffer B until a final run time of 2 minutes. Eluting peaks were monitored with MS detection in negative mode looking for the Q3 ions m/z 129→129 for ketoisocaproic acid (KIC) and m/z 132→132 for ketoisocaproic acid-d3 (KIC-d3). For the 3200 QTRAP® Ultra Performance Liquid Chromatography system, the source temperature was 550° C., ionspray voltage was −4500, and ion source gas 1 and 2 were set to 40. The declustering potential was −45, the entrance potential was −10, the collision energy was −5, and the collision cell exit potential was −3. KIC and KIC-d3 eluted at 0.95 minutes.

### Example 10

### Analytic Detection of 3-Methylbutanal

[0169] Data described in Example 8 and shown in FIG. 2 were collected using the gas chromatograph (GC) analytical method described for 3-methylbutanal detection. Samples were prepared as dilutions in ethyl acetate, and 3-methylbutanal was further extracted in the supernatant as described in Example 8. Calibration was performed by measuring several dilutions of 3-methylbutanal spiked in plasma at concentrations ranging from 1 to 50 mM. Analysis of the reaction samples was completed using an Agilent GC system equipped with a CTC PAL auto-sampler and flame ionization detector (FID). For each run, 10 μL of the prepared sample was injected using a split factor of 10:1 onto a DB-5 ms column (J&W 122-5532, 30 m×250 μm×0.25 μm nominal, 7 inch cage; Agilent) and eluted by increasing column temperature with a constant helium gas flow rate of 1.8 mL/minutes. The inlet and FID temperatures were at 250° C. and 300° C., respectively. The oven temperature was initially held at 40° C. for 3 minutes post injection, increased at a rate of 60° C./minutes until warmed to 150° C., and then held at 150° C. for 1 min longer. The total run time per sample was 5.8 minutes. Elution peaks were monitored with the FID, and 3-methylbutanal eluted at 2.5 min using this method.

### Example 11

### Active KdcA Variants with Reduced in Silico T-Cell Epitopes

[0170] In this example, experiments conducted to identify diversity that would remove T-cell epitopes from kdcA are described.

### Identification of Deimmunizing Diversity

[0171] Computational methods were employed to identify amino acids that, when mutated, could remove predicted T-cell epitopes. In parallel, the experimental search for neutral or beneficial mutations was also conducted. The predicted immunogenicity was then calculated for each active variant.

Computational Identification of Putative T-Cell Epitopes in a Variant kdcA

[0172] Putative T-cell epitopes in kdcA (SEQ ID NO. 2) identified using the Immune Epitope Database (IEDB; Immune Epitope Database and Analysis Resource website) tools, as known in the art and proprietary statistical analysis tools (See e.g., iedb.org; and Vita et al., Nucl. Acids Res., 38(Database issue):D854-62 [2010]. Epub 2009 Nov. 11]). The kdcA variant was parsed into all possible 15-mer analysis frames, with each frame overlapping the last by 14 amino acids. The 15-mer analysis frames were evaluated for immunogenic potential by scoring their 9-mer core regions for predicted binding to eight common Class II HLA-DR alleles (DRB1*0101, DRB1*0301, DRB1*0401, DRB1*0701, DRB1*0801, DRB1*1101, DRB1*1301, and DRB1*1501) that collectively cover nearly 95% of the human population (See e.g., Southwood et al., J. Immunol., 160:3363-3373 [1998]), using methods recommended on the IEDB website. Potential T-cell epitope clusters contained within the variant kdcA (i.e., sub-regions contained within the variant kdcA which have an unusually high potential for immunogenicity) were identified using statistical analysis tools, as known in the art. The identified T-cell epitope clusters were screened against the IEDB database of known epitopes and the GenBank protein database. These screens identified 11 putative T-cell epitopes in kdcA seq ID NO: 2.

### Design of Deimmunizing Libraries:

[0173] A combinatorial library containing mutations predicted to reduce immunogenicity across the 11 T-cell epitopes was constructed. In parallel, libraries were designed using saturation mutagenesis to mutagenize positions within these 11 T-cell epitopes. Variants with neutral or beneficial activity were identified from the combinatorial and saturation mutagenesis library and the effects of these mutations on the predicted binding to the eight common Class II HLA-DR alleles were analyzed. Multiple mutations were predicted to remove or reduce several of the eleven identified T cell epitopes (See, Table 7.1).

[0174] The best hits from the above combinatorial and saturation mutagenesis libraries were then recombined in another combinatorial library and screened to identify variants with neutral or beneficial diversity that further reduced the predicted TIS and IHC scores (See, Table 7.2).

### Construction and Screening of Deimmunizing Libraries

[0175] Combinatorial and saturation mutagenesis libraries designed as described above were constructed by methods known in the art, and tested for activity in the screening conditions as described in Example 4. Active variants were identified and sequenced. Their activities and mutations with respect to kdcA SEQ ID NO: 2 and SEQ ID NO: 46, are provided in Table 7.1 and Table 7.2, respectively.

### Identification of Deimmunizing Diversity

[0176] Active variants were analyzed for their levels of immunogenicity by evaluating their binding to the eight common Class II HLA-DR alleles described above. The total immunogenicity score and immunogenic hit count are indicated in Table 7.1 and Table 7.2. The total immunogenicity score reflects the overall predicted immunogenicity of the variant (i.e., a higher score indicates a higher level of predicted immunogenicity). The immunogenic “hit count” indicates the number of 15-mer analysis frames with an unusually high potential for immunogenicity (i.e., a higher hit count indicates a higher potential for immunogenicity). Mutations with a lower total predicted immunogenicity score and/or an immunogenic hit count less than that of the reference variant were considered to be “deimmunizing mutations.” The deimmunizing mutations that were identified as being the best were recombined to generate a number of variants that are active and predicted to be significantly less immunogenic than the starting reference variant kdcA. In the following Tables, the FIOP results are from the screening assay as described in Example 4; for the total immunogenicity score (TIS) and immunogenic hit count (IHC), the results are indicated for the full length kdcA protein (Table 7.1 and Table 7.2).

TABLE 11.1
Activity, Predicted Total Immunogenicity (TIS) and Immunogenic Hit Count (IHC)
for Variants Targeting Predicted T cell epitopes in kdcA Variants Relative to SEQ ID NO: 2

| | | FIOP by | | |
|---|---|---|---|---|
| | | KIC/KIC- | TIS | IHC |
| SEQ ID | | d3 (Relative | (Relative to | (Relative to |
| NO: | Amino Acid Differences | to SEQ ID | SEQ ID | SEQ ID |
| (nt/aa) | (Relative to SEQ ID NO: 2) | NO: 2)¹ | NO: 2) | NO: 2) |
| 1/2 | | + | 660 | 54 |
| 17/18 | L153A/S442A | + | 646 | 50 |
| 9/10 | M124E/S442A | + | 642 | 47 |
| 317/318 | K233N/S350K/S351D/S355T/F388P/R394H | + | 603 | 40 |
| 319/320 | S350K/S351D/A352E/S355T/F388P/R394H | + | 614 | 44 |
| 321/322 | S37A/S351D/F388P | + | 615 | 43 |
| 7/8 | L153A/I264E | + | 650 | 53 |
| 15/16 | S442A | + | 654 | 50 |
| 323/324 | S37A/Y144T/S351D/A352E | + | 606 | 41 |
| 325/326 | S252H/F275L/S442A | + | 646 | 50 |
| 327/328 | M124E/L153A/S442A | + | 634 | 47 |
| 329/330 | Y144T/R394H | + | 626 | 42 |
| 331/332 | A290G/L541I | + | 653 | 49 |
| 333/334 | F388P/R394H | + | 638 | 49 |
| 335/336 | L153A/F275L | + | 646 | 54 |
| 337/338 | V229I | + | 645 | 47 |
| 339/340 | E231K/T232F/F275L/V281A/S442A | + | 642 | 49 |
| 341/342 | S37A/Y144T/V229I/K233N/F320L/F388P | + | 574 | 30 |
| 343/344 | S37A/F388P | + | 625 | 48 |
| 345/346 | Y144T/K233N/F388P | + | 601 | 38 |
| 347/348 | L153A/I264E/F275L/R394H/S442A | + | 625 | 44 |
| 349/350 | S37A | + | 646 | 53 |
| 351/352 | L250D | + | 657 | 53 |
| 353/354 | Y144T | + | 639 | 47 |
| 355/356 | L441T | + | 634 | 49 |
| 357/358 | S252H | + | 658 | 54 |
| 359/360 | I256T | + | 645 | 52 |
| 361/362 | L541I | + | 656 | 50 |
| 363/364 | S37D | + | 646 | 53 |
| 365/366 | R38H | + | 655 | 53 |
| 367/368 | R38S | + | 656 | 53 |
| 369/370 | S37G | + | 650 | 53 |
| 371/372 | M124K | + | 648 | 51 |
| 373/374 | S151Q | + | 659 | 49 |
| 375/376 | Y144R | + | 641 | 47 |
| 377/378 | S151K | + | 655 | 49 |
| 379/380 | S151W | + | 651 | 49 |
| 381/382 | V229L | + | 644 | 51 |
| 383/384 | K233L | + | 648 | 47 |
| 385/386 | L234A | + | 653 | 53 |
| 387/388 | L254A | + | 643 | 52 |
| 389/390 | F253H | + | 654 | 52 |
| 391/392 | F253Y | + | 657 | 53 |
| 393/394 | L254G | + | 643 | 52 |
| 395/396 | S262T | + | 653 | 53 |
| 397/398 | L254S | + | 643 | 52 |
| 399/400 | I256V | + | 650 | 52 |
| 401/402 | M278C | + | 621 | 46 |
| 403/404 | R321E | + | 629 | 47 |
| 405/406 | S325F | + | 634 | 47 |
| 407/408 | R321S | + | 636 | 47 |
| 409/410 | R321L | + | 651 | 52 |
| 411/412 | S325L | + | 645 | 51 |
| 413/414 | S325H | + | 649 | 51 |
| 415/416 | A352I | + | 652 | 49 |
| 417/418 | P353E | + | 639 | 49 |
| 419/420 | S355E | + | 634 | 49 |
| 421/422 | A352W | + | 636 | 49 |
| 423/424 | S350Y | + | 657 | 53 |
| 425/426 | F347M | + | 644 | 49 |
| 427/428 | S355W | + | 634 | 49 |
| 429/430 | I348C | + | 639 | 49 |
| 431/432 | S355K | + | 646 | 50 |
| 433/434 | S350T | + | 651 | 49 |
| 435/436 | A352T | + | 655 | 49 |
| 437/438 | A352R | + | 648 | 49 |
| 439/440 | S355F | + | 649 | 50 |
| 441/442 | F347L | + | 648 | 49 |
| 443/444 | S355V | + | 648 | 50 |
| 445/446 | F388W | + | 640 | 53 |
| 447/448 | F388D | + | 630 | 49 |
| 449/450 | F388N | + | 641 | 49 |
| 451/452 | K446H | + | 641 | 49 |
| 453/454 | I443W | + | 648 | 49 |
| 455/456 | K446L | + | 648 | 49 |
| 457/458 | I443V | + | 648 | 49 |

¹Levels of increased activity were determined relative to the reference polypeptide of SEQ ID NO: 2, and defined as follows:
““+”” = 0.9 to 1.2.

TABLE 11.2
Activity, Predicted Total Immunogenicity (TIS) and Immunogenic Hit Count (IHC)
for Variants Targeting Predicted T-cell Epitopes in kdcA Variants Relative to SEQ ID NO: 46

| | | FIOP by | TIS | IHC |
|---|---|---|---|---|
| SEQ ID | | KIC/KIC-d3 | (Relative | (Relative |
| NO: | Amino Acid Differences | (Relative to SEQ | to SEQ ID | to SEQ ID |
| (nt/aa) | (Relative to SEQ ID NO: 46) | ID NO: 46)¹ | NO: 46) | NO: 46) |
| 45/46 | | + | 613 | 40 |
| 459/460 | S328L | + | 612 | 39 |
| 461/462 | M124W/Q152R/V229A/R321S/I348D/ | + | 514 | 16 |
| | S350G/F388P/K482R | | | |
| 463/464 | M124W/K233H/L254G/S328L/I348D/ | + | 534 | 21 |
| | A352N/F388P | | | |
| 465/466 | M124W/R321S/I348D/F388P | + | 538 | 21 |
| 467/468 | M124W/L254G/S328N/I348D/S350G | + | 549 | 26 |
| 469/470 | M124W/Q152R/R321S/I348D/S350G/ | + | 551 | 23 |
| | F388P | | | |
| 471/472 | M124W/Q152R/L254G/S328N/S350G/ | + | 546 | 23 |
| | F388P/K446R | | | |
| 473/474 | M124W/S328L/S350G/A352N/K446R | + | 589 | 31 |
| 475/476 | M124W/S328N | + | 592 | 33 |
| 477/478 | M124W/Q152R/V229A/K233H/R321S/ | + | 548 | 21 |
| | S350G | | | |
| 479/480 | M124W/Q152R/V229A/K233H/R321S/ | + | 548 | 21 |
| | S328L/A352Y/K446R | | | |
| 481/482 | R321S/S350G/A352N/K446R | + | 570 | 29 |
| 483/484 | Q152R/V229A/K233H/I348D/S350G/ | + | 571 | 31 |
| | A352N | | | |
| 485/486 | K233H/L254G/I348D | + | 555 | 31 |
| 487/488 | M124W/S328L/I348D/A352N/F388P | + | 566 | 26 |
| 489/490 | V229A/R321S/K446R | + | 559 | 27 |
| 491/492 | Q152R/L254G/R321S/I348D | + | 559 | 29 |
| 493/494 | M124W/S328L/I348D/S350G/A352Y/ | + | 561 | 26 |
| | F388P | | | |
| 495/496 | M124W/S328L/A352Y/F388P | + | 561 | 26 |
| 497/498 | M124W/I348D/A352N | + | 588 | 33 |
| 499/500 | Q152R/S328N/F388P/K446R | + | 588 | 33 |
| 501/502 | M124W/Q152R/F388P/K446R | + | 601 | 35 |
| 503/504 | M124W/Q152R/F388P | + | 602 | 34 |
| 505/506 | R38H/V229A/F253H/I256V/S355E | + | 538 | 26 |
| 507/508 | M124K/R321E/S325F/S355L | + | 551 | 26 |
| 509/510 | M124K/V229A/I256V/R321E/S325F/ | + | 497 | 16 |
| | S355E | | | |
| 511/512 | F253Y/L254A/R321E/S325F/S355E | + | 532 | 26 |
| 513/514 | R38H/S355E | + | 586 | 35 |
| 515/516 | R38H/S325F/S355L | + | 574 | 29 |
| 517/518 | R38H/M124K/S355E | + | 574 | 32 |
| 519/520 | P353D | + | 590 | 35 |
| 521/522 | K233L/S325L/F388D/I443W/K446E | + | 537 | 24 |
| 523/524 | F275Q/S325F/K446E | + | 552 | 31 |

¹Levels of increased activity were determined relative to the reference polypeptide of SEQ ID NO: 46, and defined as follows:
““+”” = 0.9 to 1.2.

[0177] While the invention has been described with reference to the specific embodiments, various changes can be made and equivalents can be substituted to adapt to a particular situation, material, composition of matter, process, process step or steps, thereby achieving benefits of the invention without departing from the scope of what is claimed.

[0178] For all purposes in the United States of America, each and every publication and patent document cited in this disclosure is incorporated herein by reference as if each such publication or document was specifically and individually indicated to be incorporated herein by reference. Citation of publications and patent documents is not intended as an indication that any such document is pertinent prior art, nor does it constitute an admission as to its contents or date.

The application's sequence listing, which the Patent Office published only in electronic form, follows.

SEQUENCE LISTING (524 sequences)

SEQ ID NO: 1 - DNA, 1641 bp, Artificial Sequence
  wild type sequence for branched-chain keto acid decarboxylase (kdcA) from Lactococcus lactis
atgtacaccgttggcgactatctgctggaccgtctgcatgaactgggaattgaagaaatctttggcgtgccgggcgattacaatctgcaattcctggatcaaatcattagccgcgaagatatgaaatggattggtaacgcgaatgaactgaatgcgagctacatggctgatggctatgcacgtacgaagaaggcggcggcgttcctgacgaccttcggtgttggtgaactgagcgcaatcaatgggttggcgggcagctatgcagagaacctgccagtcgtggaaatcgttgggagtccgacctcgaaggtgcagaacgatggcaagttcgttcatcacaccctggccgacggcgacttcaagcacttcatgaagatgcacgaaccggtcaccgctgcacgtacactgctgaccgccgagaacgcgacctatgagattgaccgcgtgctgagccaactgctgaaagaacgtaaacctgtgtacatcaacctgccggttgatgtcgccgcggcgaaagccgagaaaccagctctgagcctggagaaagaaagcagcacgaccaacaccacagaacaggtgatcctgtcgaagatcgaagaaagcctgaagaacgcccagaaaccggtcgtgatcgctgggcacgaggtgattagcttcggtctggagaagacggttacgcagtttgtgagtgaaaccaaactgccgattactaccctgaactttggcaaatcggctgtggatgaatccctgccgtccttcctgggtatctacaatggtaaactgagcgagattagcctcaagaactttgtggaaagcgcagacttcatcctgatgcttggtgtgaaactgacggatagcagtacgggcgcgtttacgcaccatctggacgagaacaagatgattagcctgaacattgatgaaggcatcatcttcaacaaagtcgtagaagacttcgatttccgtgcggttgttagcagcctgagcgagctgaaaggcattgaatacgaaggtcagtacattgataagcagtacgaagagttcattccgagcagcgcaccactgagccaagaccgtctgtggcaagcagtagaatctctgacacagtccaatgaaaccattgtggcggaacagggcacgtcgttcttcggtgcctccaccatcttcctgaagagcaattcacgcttcatcggtcagccgctttggggcagcatcggctatacgtttccggcagcactgggatcacagattgcggataaggaaagtcgccatctgctgttcattggtgatggtagcctgcaactgaccgtgcaggagctgggcctgtcgatccgtgagaaactgaacccgatttgtttcatcatcaacaacgatggctataccgtagagcgcgagattcatgggcctacacagagctacaatgacatcccgatgtggaactatagcaaactgccggaaacctttggcgcgacggaagatcgcgtagttagcaagatcgttcgcacagagaacgagtttgtgagtgtcatgaaagaagcgcaggccgatgttaaccgcatgtattggattgaactggttctggagaaagaagatgcaccgaaactgctgaagaagatggggaagctgtttgcagaacagaacaaa

SEQ ID NO: 2 - protein, 547 aa, Artificial Sequence
  wild type sequence for branched-chain keto acid decarboxylase (kdcA) from Lactococcus lactis
MYTVGDYLLDRLHELGIEEIFGVPGDYNLQFLDQIISREDMKWIGNANELNASYMADGYARTKKAAAFLTTFGVGELSAINGLAGSYAENLPVVEIVGSPTSKVQNDGKFVHHTLADGDFKHFMKMHEPVTAARTLLTAENATYEIDRVLSQLLKERKPVYINLPVDVAAAKAEKPALSLEKESSTTNTTEQVILSKIEESLKNAQKPVVIAGHEVISFGLEKTVTQFVSETKLPITTLNFGKSAVDESLPSFLGIYNGKLSEISLKNFVESADFILMLGVKLTDSSTGAFTHHLDENKMISLNIDEGIIFNKVVEDFDFRAVVSSLSELKGIEYEGQYIDKQYEEFIPSSAPLSQDRLWQAVESLTQSNETIVAEQGTSFFGASTIFLKSNSRFIGQPLWGSIGYTFPAALGSQIADKESRHLLFIGDGSLQLTVQELGLSIREKLNPICFIINNDGYTVEREIHGPTQSYNDIPMWNYSKLPETFGATEDRVVSKIVRTENEFVSVMKEAQADVNRMYWIELVLEKEDAPKLLKKMGKLFAEQNK

SEQ ID NO: 3 - DNA, 1641 bp, Artificial Sequence
  Variant of branched-chain keto acid decarboxylase (kdcA) from Lactococcus lactis
atgtacaccgttggcgactatctgctggaccgtctgcatgaactgggaattgaagaaatctttggcgtgccgggcgattacaatctgcaattcctggatcaaatcattagccgcgaagatatgaaatggattggtaacgcgaatgaactgaatgcgagctacatggctgatggctatgcacgtacgaagaaggcggcggcgttcctgacgaccttcggtgttggtgaactgagcgcaatcaatgggttggcgggcagctatgcagagaacctgccagtcgtggaaatcgttgggagtccgacctcgaaggtgcagaacgatggcaagttcgttcatcacaccctggccgacggcgacttcaagcacttcatgaagatgcacgaaccggtcaccgctgcacgtacactgctgaccgccgagaacgcgacctatgagattgaccgcgtgctgagccaactgctgaaagaacgtaaacctgtgtacatcaacctgccggttgatgtcgccgcggcgaaagccgagaaaccagctctgagcctggagaaagaaagcagcacgaccaacaccacagaacaggtgatcctgtcgaagatcgaagaaagcctgaagaacgcccagaaaccggtcgtgatcgctgggcacgaggtgattagcttcggtctggagaagacggttacgcagtttgtgagtgaaaccaaactgccgattactaccctgaactttggcaaatcggctgtggatgaatccctgccgtccttcctgggtatctacaatggtaaactgagcgagattagcctcaagaactttgtggaaagcgcagacttcatcctgatgcttggtgtgaaactgacggatagcagtacgggcgcgtttacgcaccatctggacgagaacaagatgattagcctgaacattgatgaaggcatcatcttcaacaaagtcgtagaagacttcgatttccgtgcggttgttagcagcctgagcgagctgaaaggcattgaatacgaaggtcagtacattgataagcagtacgaagagttcattccgagcagcgcaccactgagccaagaccgtctgtggcaagcagtagaatctctgacacagtccaatgaaaccattgtggcggaacagggcacgtcgttcttcggtgcctccaccatcttcctgaagagcaattcacgcttcatcggtcagccgctttggggcagcatcggctatacgtttccggcagcactgggatcacagattgcggataaggaaagtcgccatctgctgttcattggtgatggtagcctgcaactgaccgtgcaggagctgggcctgtcgatccgtgagaaactgaacccgatttgtttcatcatcaacaacgatggctataccgtagagcgcgagattcatgggcctacacagccatacaatgacatcccgatgtggaactatagcaaactgccggaaacctttggcgcgacggaagatcgcgtagttagcaagatcgttcgcacagagaacgagtttgtgagtgtcatgaaagaagcgcaggccgatgttaaccgcatgtattggattgaactggttctggagaaagaagatgcaccgaaactgctgaagaagatggggaagctgtttgcagaacagaacaaa

SEQ ID NO: 4 - protein, 547 aa, Artificial Sequence
  Variant of branched-chain keto acid decarboxylase (kdcA) from Lactococcus lactis
MYTVGDYLLDRLHELGIEEIFGVPGDYNLQFLDQIISREDMKWIGNANELNASYMADGYARTKKAAAFLTTFGVGELSAINGLAGSYAENLPVVEIVGSPTSKVQNDGKFVHHTLADGDFKHFMKMHEPVTAARTLLTAENATYEIDRVLSQLLKERKPVYINLPVDVAAAKAEKPALSLEKESSTTNTTEQVILSKIEESLKNAQKPVVIAGHEVISFGLEKTVTQFVSETKLPITTLNFGKSAVDESLPSFLGIYNGKLSEISLKNFVESADFILMLGVKLTDSSTGAFTHHLDENKMISLNIDEGIIFNKVVEDFDFRAVVSSLSELKGIEYEGQYIDKQYEEFIPSSAPLSQDRLWQAVESLTQSNETIVAEQGTSFFGASTIFLKSNSRFIGQPLWGSIGYTFPAALGSQIADKESRHLLFIGDGSLQLTVQELGLSIREKLNPICFIINNDGYTVEREIHGPTQPYNDIPMWNYSKLPETFGATEDRVVSKIVRTENEFVSVMKEAQADVNRMYWIELVLEKEDAPKLLKKMGKLFAEQNK

SEQ ID NO: 5 - DNA, 1641 bp, Artificial Sequence
  Variant of branched-chain keto acid decarboxylase (kdcA) from Lactococcus lactis
atgtacaccgttggcgactatctgctggaccgtctgcatgaactgggaattgaagaaatctttggcgtgccgggcgattactttctgcaattcctggatcaaatcattagccgcgaagatatgaaatggattggtaacgcgaatgaactgaatgcgagctacatggctgatggctatgcacgtacgaagaaggcggcggcgttcctgacgaccttcggtgttggtgaactgagcgcaatcaatgggttggcgggcagctatgcagagaacctgccagtcgtggaaatcgttgggagtccgacctcgaaggtgcagaacgatggcaagttcgttcatcacaccctggccgacggcgacttcaagcacttcatgaagatgcacgaaccggtcaccgctgcacgtacactgctgaccgccgagaacgcgacctatgagattgaccgcgtgctgagccaactgctgaaagaacgtaaacctgtgtacatcaacctgccggttgatgtcgccgcggcgaaagccgagaaaccagctctgagcctggagaaagaaagcagcacgaccaacaccacagaacaggtgatcctgtcgaagatcgaagaaagcctgaagaacgcccagaaaccggtcgtgatcgctgggcacgaggtgattagcttcggtctggagaagacggttacgcagtttgtgagtgaaaccaaactgccgattactaccctgaactttggcaaatcggctgtggatgaatccctgccgtccttcctgggtatctacaatggtaaactgagcgagattagcctcaagaactttgtggaaagcgcagacttcatcctgatgcttggtgtgaaactgacggatagcagtacgggcgcgtttacgcaccatctggacgagaacaagatgattagcctgaacattgatgaaggcatcatcttcaacaaagtcgtagaagacttcgatttccgtgcggttgttagcagcctgagcgagctgaaaggcattgaatacgaaggtcagtacattgataagcagtacgaagagttcattccgagcagcgcaccactgagccaagaccgtctgtggcaagcagtagaatctctgacacagtccaatgaaaccattgtggcggaacagggcacgtcgttcttcggtgcctccaccatcttcctgaagagcaattcacgcttcatcggtcagccgctttggggcagcatcggctatacgtttccggcagcactgggatcacagattgcggataaggaaagtcgccatctgctgttcattggtgatggtagcctgcaactgaccgtgcaggagctgggcctgtcgatccgtgagaaactgaacccgatttgtttcatcatcaacaacgatggctataccgtagagcgcgagattcatgggcctacacagagctacaatgacatcccgatgtggaactatagcaaactgccggaaacctttggcgcgacggaagatcgcgtagttagcaagatcgttcgcacagagaacgagtttgtgagtgtcatgaaagaagcgcaggccgatgttaaccgcatgtattggattgaactggttctggagaaagaagatgcaccgaaactgctgaagaagatggggaagctgtttgcagaacagaacaaa

SEQ ID NO: 6 - protein, 547 aa, Artificial Sequence
  Variant of branched-chain keto acid decarboxylase (kdcA) from Lactococcus lactis
MYTVGDYLLDRLHELGIEEIFGVPGDYFLQFLDQIISREDMKWIGNANELNASYMADGYARTKKAAAFLTTFGVGELSAINGLAGSYAENLPVVEIVGSPTSKVQNDGKFVHHTLADGDFKHFMKMHEPVTAARTLLTAENATYEIDRVLSQLLKERKPVYINLPVDVAAAKAEKPALSLEKESSTTNTTEQVILSKIEESLKNAQKPVVIAGHEVISFGLEKTVTQFVSETKLPITTLNFGKSAVDESLPSFLGIYNGKLSEISLKNFVESADFILMLGVKLTDSSTGAFTHHLDENKMISLNIDEGIIFNKVVEDFDFRAVVSSLSELKGIEYEGQYIDKQYEEFIPSSAPLSQDRLWQAVESLTQSNETIVAEQGTSFFGASTIFLKSNSRFIGQPLWGSIGYTFPAALGSQIADKESRHLLFIGDGSLQLTVQELGLSIREKLNPICFIINNDGYTVEREIHGPTQSYNDIPMWNYSKLPETFGATEDRVVSKIVRTENEFVSVMKEAQADVNRMYWIELVLEKEDAPKLLKKMGKLFAEQNK

SEQ ID NO: 7 - DNA, 1641 bp, Artificial Sequence
  Variant of branched-chain keto acid decarboxylase (kdcA) from Lactococcus lactis
atgtacaccgttggcgactatctgctggaccgtctgcatgaactgggaattgaagaaatctttggcgtgccgggcgattacaatctgcaattcctggatcaaatcattagccgcgaagatatgaaatggattggtaacgcgaatgaactgaatgcgagctacatggctgatggctatgcacgtacgaagaaggcggcggcgttcctgacgaccttcggtgttggtgaactgagcgcaatcaatgggttggcgggcagctatgcagagaacctgccagtcgtggaaatcgttgggagtccgacctcgaaggtgcagaacgatggcaagttcgttcatcacaccctggccgacggcgacttcaagcacttcatgaagatgcacgaaccggtcaccgctgcacgtacactgctgaccgccgagaacgcgacctatgagattgaccgcgtgctgagccaagcgctgaaagaacgtaaacctgtgtacatcaacctgccggttgatgtcgccgcggcgaaagccgagaaaccagctctgagcctggagaaagaaagcagcacgaccaacaccacagaacaggtgatcctgtcgaagatcgaagaaagcctgaagaacgcccagaaaccggtcgtgatcgctgggcacgaggtgattagcttcggtctggagaagacggttacgcagtttgtgagtgaaaccaaactgccgattactaccctgaactttggcaaatcggctgtggatgaatccctgccgtccttcctgggtatctacaatggtaaactgagcgaggagagcctcaagaactttgtggaaagcgcagacttcatcctgatgcttggtgtgaaactgacggatagcagtacgggcgcgtttacgcaccatctggacgagaacaagatgattagcctgaacattgatgaaggcatcatcttcaacaaagtcgtagaagacttcgatttccgtgcggttgttagcagcctgagcgagctgaaaggcattgaatacgaaggtcagtacattgataagcagtacgaagagttcattccgagcagcgcaccactgagccaagaccgtctgtggcaagcagtagaatctctgacacagtccaatgaaaccattgtggcggaacagggcacgtcgttcttcggtgcctccaccatcttcctgaagagcaattcacgcttcatcggtcagccgctttggggcagcatcggctatacgtttccggcagcactgggatcacagattgcggataaggaaagtcgccatctgctgttcattggtgatggtagcctgcaactgaccgtgcaggagctgggcctgtcgatccgtgagaaactgaacccgatttgtttcatcatcaacaacgatggctataccgtagagcgcgagattcatgggcctacacagagctacaatgacatcccgatgtggaactatagcaaactgccggaaacctttggcgcgacggaagatcgcgtagttagcaagatcgttcgcacagagaacgagtttgtgagtgtcatgaaagaagcgcaggccgatgttaaccgcatgtattggattgaactggttctggagaaagaagatgcaccgaaactgctgaagaagatggggaagctgtttgcagaacagaacaaa

SEQ ID NO: 8 - protein, 547 aa, Artificial Sequence
  Variant of branched-chain keto acid decarboxylase (kdcA) from Lactococcus lactis
MYTVGDYLLDRLHELGIEEIFGVPGDYNLQFLDQIISREDMKWIGNANELNASYMADGYARTKKAAAFLTTFGVGELSAINGLAGSYAENLPVVEIVGSPTSKVQNDGKFVHHTLADGDFKHFMKMHEPVTAARTLLTAENATYEIDRVLSQALKERKPVYINLPVDVAAAKAEKPALSLEKESSTTNTTEQVILSKIEESLKNAQKPVVIAGHEVISFGLEKTVTQFVSETKLPITTLNFGKSAVDESLPSFLGIYNGKLSEESLKNFVESADFILMLGVKLTDSSTGAFTHHLDENKMISLNIDEGIIFNKVVEDFDFRAVVSSLSELKGIEYEGQYIDKQYEEFIPSSAPLSQDRLWQAVESLTQSNETIVAEQGTSFFGASTIFLKSNSRFIGQPLWGSIGYTFPAALGSQIADKESRHLLFIGDGSLQLTVQELGLSIREKLNPICFIINNDGYTVEREIHGPTQSYNDIPMWNYSKLPETFGATEDRVVSKIVRTENEFVSVMKEAQADVNRMYWIELVLEKEDAPKLLKKMGKLFAEQNK

SEQ ID NO: 9 - DNA, 1641 bp, Artificial Sequence
  Variant of branched-chain keto acid decarboxylase (kdcA) from Lactococcus lactis
atgtacaccgttggcgactatctgctggaccgtctgcatgaactgggaattgaagaaatctttggcgtgccgggcgattacaatctgcaattcctggatcaaatcattagccgcgaagatatgaaatggattggtaacgcgaatgaactgaatgcgagctacatggctgatggctatgcacgtacgaagaaggcggcggcgttcctgacgaccttcggtgttggtgaactgagcgcaatcaatgggttggcgggcagctatgcagagaacctgccagtcgtggaaatcgttgggagtccgacctcgaaggtgcagaacgatggcaagttcgttcatcacaccctggccgacggcgacttcaagcacttcgagaagatgcacgaaccggtcaccgctgcacgtacactgctgaccgccgagaacgcgacctatgagattgaccgcgtgctgagccaactgctgaaagaacgtaaacctgtgtacatcaacctgccggttgatgtcgccgcggcgaaagccgagaaaccagctctgagcctggagaaagaaagcagcacgaccaacaccacagaacaggtgatcctgtcgaagatcgaagaaagcctgaagaacgcccagaaaccggtcgtgatcgctgggcacgaggtgattagcttcggtctggagaagacggttacgcagtttgtgagtgaaaccaaactgccgattactaccctgaactttggcaaatcggctgtggatgaatccctgccgtccttcctgggtatctacaatggtaaactgagcgagattagcctcaagaactttgtggaaagcgcagactttatcctgatgcttggtgtgaaactgacggatagcagtacgggcgcgtttacgcaccatctggacgagaacaagatgattagcctgaacattgatgaaggcatcatcttcaacaaagtcgtagaagacttcgatttccgtgcggttgttagcagcctgagcgagctgaaaggcattgaatacgaaggtcagtacattgataagcagtacgaagagttcattccgagcagcgcaccactgagccaagaccgtctgtggcaagcagtagaatctctgacacagtccaatgaaaccattgtggcggaacagggcacgtcgttcttcggtgcctccaccatcttcctgaagagcaattcacgcttcatcggtcagccgctttggggcagcatcggctatacgtttccggcagcactgggatcacagattgcggataaggaaagtcgccatctgctgttcattggtgatggtagcctgcaactgaccgtgcaggagctgggcctggcgatccgtgagaaactgaacccgatttgtttcatcatcaacaacgatggctataccgtagagcgcgagattcatgggcctacacagagctacaatgacatcccgatgtggaactatagcaaactgccggaaacctttggcgcgacggaagatcgcgtagttagcaagatcgttcgcacagagaacgagtttgtgagtgtcatgaaagaagcgcaggccgatgttaaccgcatgtattggattgaactggttctggagaaagaagatgcaccgaaactgctgaagaagatggggaagctgtttgcagaacagaacaaa

SEQ ID NO: 10 - protein, 547 aa, Artificial Sequence
  Variant of branched-chain keto acid decarboxylase (kdcA) from Lactococcus lactis
MYTVGDYLLDRLHELGIEEIFGVPGDYNLQFLDQIISREDMKWIGNANELNASYMADGYARTKKAAAFLTTFGVGELSAINGLAGSYAENLPVVEIVGSPTSKVQNDGKFVHHTLADGDFKHFEKMHEPVTAARTLLTAENATYEIDRVLSQLLKERKPVYINLPVDVAAAKAEKPALSLEKESSTTNTTEQVILSKIEESLKNAQKPVVIAGHEVISFGLEKTVTQFVSETKLPITTLNFGKSAVDESLPSFLGIYNGKLSEISLKNFVESADFILMLGVKLTDSSTGAFTHHLDENKMISLNIDEGIIFNKVVEDFDFRAVVSSLSELKGIEYEGQYIDKQYEEFIPSSAPLSQDRLWQAVESLTQSNETIVAEQGTSFFGASTIFLKSNSRFIGQPLWGSIGYTFPAALGSQIADKESRHLLFIGDGSLQLTVQELGLAIREKLNPICFIINNDGYTVEREIHGPTQSYNDIPMWNYSKLPETFGATEDRVVSKIVRTENEFVSVMKEAQADVNRMYWIELVLEKEDAPKLLKKMGKLFAEQNK

SEQ ID NO: 11 - DNA, 1641 bp, Artificial Sequence
  Variant of branched-chain keto acid decarboxylase (kdcA) from Lactococcus lactis
atgtacaccgttggcgactatctgctggaccgtctgcatgaactgggaattgaagaaatctttggcgtgccgggcgattacaatctgcaattcctggatcaaatcattgcgcgcgaagatatgaaatggattggtaacgcgaatgaactgaatgcgagctacatggctgatggctatgcacgtacgaagaaggcggcggcgttcctgacgaccttcggtgttggtgaactgagcgcaatcaatgggttggcgggcagctatgcagagaacctgccagtcgtggaaatcgttgggagtccgacctcgaaggtgcagaacgatggcaagttcgttcatcacaccctggccgacggcgacttcaagcacttcatgaagatgcacgaaccggtcaccgctgcacgtacactgctgaccgccgagaacgcgacctatgagattgaccgcgtgctgagccaactgctgaaagaacgtaaacctgtgtacatcaacctgccggttgatgtcgccgcggcgaaagccgagaaaccagctctgagcctggagaaagaaagcagcacgaccaacaccacagaacaggtgatcctgtcgaagatcgaagaaagcctgaagaacgcccagaaaccggtcgtgatcgctgggcacgaggtgattagcttcggtctggagaagacggttacgcagtttgtgagtgaaaccaaactgccgattactaccctgaactttggcaaatcggctgtggatgaatccctgccgtccttcctgggtatctacaatggtaaactgagcgagattagcctcaagaactttgtggaaagcgcagacttcatcctgatgcttggtgtgaaactgacggatagcagtacgggcgcgtttacgcaccatctggacgagaacaagatgattagcctgaacattgatgaaggcatcatcttcaacaaagtcgtagaagacttcgatttccgtgcggttgttagcagcctgagcgagctgaaaggcattgaatacgaaggtcagtacattgataagcagtacgaagagttcattccgagcagcgcaccactgagccaagaccgtctgtggcaagcagtagaatctctgacacagtccaatgaaaccattgtggcggaacagggcacgtcgttcttcggtgcctccaccatcttcctgaagagcaattcacgcttcatcggtcagccgctttggggcagcatcggctatacgtttccggcagcactgggatcacagattgcggataaggaaagtcgccatctgctgttcattggtgatggtagcctgcaactgaccgtgcaggagctgggcctgtcgatccgtgagaaactgaacccgatttgtttcatcatcaacaacgatggctataccgtagagcgcgagattcatgggcctacacagagctacaatgacatcccgatgtggaactatagcaaactgccggaaacctttggcgcgacggaagatcgcgtagttagcaagatcgttcgcacagagaacgagtttgtgagtgtcatgaaagaagcgcaggccgatgttaaccgcatgtattggattgaactggttctggagaaagaagatgcaccgaaactgctgaagaagatggggaagctgtttgcagaacagaacaaa

SEQ ID NO: 12 - protein, 547 aa, Artificial Sequence
  Variant of branched-chain keto acid decarboxylase (kdcA) from Lactococcus lactis
MYTVGDYLLDRLHELGIEEIFGVPGDYNLQFLDQIIAREDMKWIGNANELNASYMADGYARTKKAAAFLTTFGVGELSAINGLAGSYAENLPVVEIVGSPTSKVQNDGKFVHHTLADGDFKHFMKMHEPVTAARTLLTAENATYEIDRVLSQLLKERKPVYINLPVDVAAAKAEKPALSLEKESSTTNTTEQVILSKIEESLKNAQKPVVIAGHEVISFGLEKTVTQFVSETKLPITTLNFGKSAVDESLPSFLGIYNGKLSEISLKNFVESADFILMLGVKLTDSSTGAFTHHLDENKMISLNIDEGIIFNKVVEDFDFRAVVSSLSELKGIEYEGQYIDKQYEEFIPSSAPLSQDRLWQAVESLTQSNETIVAEQGTSFFGASTIFLKSNSRFIGQPLWGSIGYTFPAALGSQIADKESRHLLFIGDGSLQLTVQELGLSIREKLNPICFIINNDGYTVEREIHGPTQSYNDIPMWNYSKLPETFGATEDRVVSKIVRTENEFVSVMKEAQADVNRMYWIELVLEKEDAPKLLKKMGKLFAEQNK

SEQ ID NO: 13 - DNA, 1641 bp, Artificial Sequence
  Variant of branched-chain keto acid decarboxylase (kdcA) from Lactococcus lactis
atgtacaccgttggcgactatctgctggaccgtctgcatgaactgggaattgaagaaatctttggcgtgccgggcgattacaatctgcaattcctggatcaaatcattagccgcgaagatatgaaatggattggtaacgcgaatgaactgaatgcgagctacatggctgatggctatgcacgtacgaagaaggcggcggcgttcctgacgaccttcggtgttggtgaactgagcgcaatcaatgggttggcgggcagctatgcagagaacctgccagtcgtggaaatcgttgggagtccgacctcgaaggtgcagaacgatggcaagttcgttcatcacaccctggccgacggcgacttcaagcacttcatgaagatgcacgaaccggtcaccgctgcacgtacactgctgaccgccgagaacgcgacctatgagattgaccgcgtgctgagccaactgctgaaagaacgtaaacctgtgtacatcaacctgccggttgatgtcgccgcggcgaaagccgagaaaccagctctgagcctggagaaagaaagcagcacgaccaacaccacagaacaggtgatcctgtcgaagatcgaagaaagcctgaagaacgcccagaaaccggtcgtgatcgctgggcacgaggtgattagcttcggtctggagaagacggttacgcagtttgtgagtgaaaccaaactgccgattactaccctgaactttggcaaatcggctgtggatgaatccctgccgtccttcctgggtatctacaatggtaaactgagcgagattagcctcaagaactttgtggaaagcgcagacttcatcctgatgcttggtgtgaaactgacggatagcagtacgggcgcgtttacgcaccatctggacgagaacaagatgattagcctgaacattgatgaaggcatcatcttcaacaaagtcgtagaagacttcgatttccgtgcggttgttagcagcctgagcgagctgaaaggcattgaatacgaaggtcagtacattgataagcagtacgaagagttcattccgagcagcgcaccactgagccaagaccgtctgtggcaagcagtagaatctctgacacagtccaatgaaaccattgtggcggaacagggcacgtcgttcttcggtgcctccaccatcttcctgaagagcaattcacgcttcatcggtcagccgctttggggcagcatcggctatacgtttccggcagcactgggatcacagattgcggataaggaaagtcgccatctgctgttcattggtgatggtagcctgcaactgaccgtgcaggagctgggcctgtcgatccgtgagaaactgaacccgatttgtttcatcatcaacaacgatggctataccgtagagcgcgagattcatgggcctacacagagctacaatgacatcccgatgtggaactatagcaaactgccggaaacctttggcgcgacggaagatcgcgtagttagcaagatcgttattacagagaacgagtttgtgagtgtcatgaaagaagcgcaggccgatgttaaccgcatgtattggattgaactggttctggagaaagaagatgcaccgaaactgctgaagaagatggggaagctgtttgcagaacagaacaaa

SEQ ID NO: 14 - protein, 547 aa, Artificial Sequence
  Variant of branched-chain keto acid decarboxylase (kdcA) from Lactococcus lactis
MYTVGDYLLDRLHELGIEEIFGVPGDYNLQFLDQIISREDMKWIGNANELNASYMADGYARTKKAAAFLTTFGVGELSAINGLAGSYAENLPVVEIVGSPTSKVQNDGKFVHHTLADGDFKHFMKMHEPVTAARTLLTAENATYEIDRVLSQLLKERKPVYINLPVDVAAAKAEKPALSLEKESSTTNTTEQVILSKIEESLKNAQKPVVIAGHEVISFGLEKTVTQFVSETKLPITTLNFGKSAVDESLPSFLGIYNGKLSEISLKNFVESADFILMLGVKLTDSSTGAFTHHLDENKMISLNIDEGIIFNKVVEDFDFRAVVSSLSELKGIEYEGQYIDKQYEEFIPSSAPLSQDRLWQAVESLTQSNETIVAEQGTSFFGASTIFLKSNSRFIGQPLWGSIGYTFPAALGSQIADKESRHLLFIGDGSLQLTVQELGLSIREKLNPICFIINNDGYTVEREIHGPTQSYNDIPMWNYSKLPETFGATEDRVVSKIVITENEFVSVMKEAQADVNRMYWIELVLEKEDAPKLLKKMGKLFAEQNK

SEQ ID NO: 15 - DNA, 1641 bp, Artificial Sequence
  Variant of branched-chain keto acid decarboxylase (kdcA) from Lactococcus lactis
atgtacaccgttggcgactatctgctggaccgtctgcatgaactgggaattgaagaaatctttggcgtgccgggcgattacaatctgcaattcctggatcaaatcattagccgcgaagatatgaaatggattggtaacgcgaatgaactgaatgcgagctacatggctgatggctatgcacgtacgaagaaggcggcggcgttcctgacgaccttcggtgttggtgaactgagcgcaatcaatgggttggcgggcagctatgcagagaacctgccagtcgtggaaatcgttgggagtccgacctcgaaggtgcagaacgatggcaagttcgttcatcacaccctggccgacggcgacttcaagcacttcatgaagatgcacgaaccggtcaccgctgcacgtacactgctgaccgccgagaacgcgacctatgagattgaccgcgtgctgagccaactgctgaaagaacgtaaacctgtgtacatcaacctgccggttgatgtcgccgcggcgaaagccgagaaaccagctctgagcctggagaaagaaagcagcacgaccaacaccacagaacaggtgatcctgtcgaagatcgaagaaagcctgaagaacgcccagaaaccggtcgtgatcgctgggcacgaggtgattagcttcggtctggagaagacggttacgcagtttgtgagtgaaaccaaactgccgattactaccctgaactttggcaaatcggctgtggatgaatccctgccgtcgttcctgggtatctacaatggtaaactgagcgagattagcctcaagaactttgtggaaagcgcagactttatcctgatgcttggtgtgaaactgacggatagcagtacgggcgcgtttacgcaccatctggacgagaacaagatgattagcctgaacattgatgaaggcatcatcttcaacaaagtcgtagaagacttcgatttccgtgcggttgttagcagcctgagcgagctgaaaggcattgaatacgaaggtcagtacattgataagcagtacgaagagttcattccgagcagcgcaccactgagccaagaccgtctgtggcaagcagtagaatctctgacacagtccaatgaaaccattgtggcggaacagggcacgtcgttcttcggtgcctccaccatcttcctgaagagcaattcacgtttcatcggtcagccgctttggggcagcatcggctatacgtttccggcagcactgggatcacagattgcggataaggaaagtcgccatctgctgttcattggtgatggtagcctgcaactgaccgtgcaggagctgggcctggcgatccgtgagaaactgaacccgatttgtttcatcatcaacaacgatggctataccgtagagcgcgagattcatgggcctacacagagctacaatgacatcccgatgtggaactatagcaaactgccggaaacctttggcgcgacggaagatcgcgtagttagcaagatcgttcgcacagagaacgagtttgtgagtgtcatgaaagaagcgcaggccgatgttaaccgcatgtattggattgaactggttctggagaaagaagatgcaccgaaactgctgaagaagatggggaagctttttgcagaacagaacaaa

SEQ ID NO: 16 - protein, 547 aa, Artificial Sequence
  Variant of branched-chain keto acid decarboxylase (kdcA) from Lactococcus lactis
MYTVGDYLLDRLHELGIEEIFGVPGDYNLQFLDQIISREDMKWIGNANELNASYMADGYARTKKAAAFLTTFGVGELSAINGLAGSYAENLPVVEIVGSPTSKVQNDGKFVHHTLADGDFKHFMKMHEPVTAARTLLTAENATYEIDRVLSQLLKERKPVYINLPVDVAAAKAEKPALSLEKESSTTNTTEQVILSKIEESLKNAQKPVVIAGHEVISFGLEKTVTQFVSETKLPITTLNFGKSAVDESLPSFLGIYNGKLSEISLKNFVESADFILMLGVKLTDSSTGAFTHHLDENKMISLNIDEGIIFNKVVEDFDFRAVVSSLSELKGIEYEGQYIDKQYEEFIPSSAPLSQDRLWQAVESLTQSNETIVAEQGTSFFGASTIFLKSNSRFIGQPLWGSIGYTFPAALGSQIADKESRHLLFIGDGSLQLTVQELGLAIREKLNPICFIINNDGYTVEREIHGPTQSYNDIPMWNYSKLPETFGATEDRVVSKIVRTENEFVSVMKEAQADVNRMYWIELVLEKEDAPKLLKKMGKLFAEQNK

SEQ ID NO: 17 - DNA, 1641 bp, Artificial Sequence
  Variant of branched-chain keto acid decarboxylase (kdcA) from Lactococcus lactis
atgtacaccgttggcgactatctgctggaccgtctgcatgaactgggaattgaagaaatctttggcgtgccgggcgattacaatctgcaattcctggatcaaatcattagccgcgaagatatgaaatggattggtaacgcgaatgaactgaatgcgagctacatggctgatggctatgcacgtacgaagaaggcggcggcgttcctgacgaccttcggtgttggtgaactgagcgcaatcaatgggttggcgggcagctatgcagagaacctgccagtcgtggaaatcgttgggagtccgacctcgaaggtgcagaacgatggcaagttcgttcatcacaccctggccgacggcgacttcaagcacttcatgaagatgcacgaaccggtcaccgctgcacgtacactgctgaccgccgagaacgcgacctatgagattgaccgcgtgctgagccaagcgctgaaagaacgtaaacctgtgtacatcaacctgccggttgatgtcgccgcggcgaaagccgagaaaccagctctgagcctggagaaagaaagcagcacgaccaacaccacagaacaggtgatcctgtcgaagatcgaagaaagcctgaagaacgcccagaaaccggtcgtgatcgctgggcacgaggtgattagcttcggtctggagaagacggttacgcagtttgtgagtgaaaccaaactgccgattactaccctgaactttggcaaatcggctgtggatgaatccctgccgtccttcctgggtatctacaatggtaaactgagcgagattagcctcaagaactttgtggaaagcgcagacttcatcctgatgcttggtgtgaaactgacggatagcagtacgggcgcgtttacgcaccatctggacgagaacaagatgattagcctgaacattgatgaaggcatcatcttcaacaaagtcgtagaagacttcgatttccgtgcggttgttagcagcctgagcgagctgaaaggcattgaatacgaaggtcagtacattgataagcagtacgaagagttcattccgagcagcgcaccactgagccaagaccgtctgtggcaagcagtagaatctctgacacagtccaatgaaaccattgtggcggaacagggcacgtcgttcttcggtgcctccaccatcttcctgaagagcaattcacgcttcatcggtcagccgctttggggcagcatcggctatacgtttccggcagcactgggatcacagattgcggataaggaaagtcgccatctgctgttcattggtgatggtagcctgcaactgaccgtgcaggagctgggcctggcgatccgtgagaaactgaacccgatttgtttcatcatcaacaacgatggctataccgtagagcgcgagattcatgggcctacacagagctacaatgacatcccgatgtggaactatagcaaactgccggaaacctttggcgcgacggaagatcgcgtagttagcaagatcgttcgcacagagaacgagtttgtgagtgtcatgaaagaagcgcaggccgatgttaaccgcatgtattggattgaactggttctggagaaagaagatgcaccgaaactgctgaagaagatggggaagctttttgcagaacagaacaaa

SEQ ID NO: 18 - protein, 547 aa, Artificial Sequence
  Variant of branched-chain keto acid decarboxylase (kdcA) from Lactococcus lactis
MYTVGDYLLDRLHELGIEEIFGVPGDYNLQFLDQIISREDMKWIGNANELNASYMADGYARTKKAAAFLTTFGVGELSAINGLAGSYAENLPVVEIVGSPTSKVQNDGKFVHHTLADGDFKHFMKMHEPVTAARTLLTAENATYEIDRVLSQALKERKPVYINLPVDVAAAKAEKPALSLEKESSTTNTTEQVILSKIEESLKNAQKPVVIAGHEVISFGLEKTVTQFVSETKLPITTLNFGKSAVDESLPSFLGIYNGKLSEISLKNFVESADFILMLGVKLTDSSTGAFTHHLDENKMISLNIDEGIIFNKVVEDFDFRAVVSSLSELKGIEYEGQYIDKQYEEFIPSSAPLSQDRLWQAVESLTQSNETIVAEQGTSFFGASTIFLKSNSRFIGQPLWGSIGYTFPAALGSQIADKESRHLLFIGDGSLQLTVQELGLAIREKLNPICFIINNDGYTVEREIHGPTQSYNDIPMWNYSKLPETFGATEDRVVSKIVRTENEFVSVMKEAQADVNRMYWIELVLEKEDAPKLLKKMGKLFAEQNK

SEQ ID NO: 19 - DNA, 1641 bp, Artificial Sequence
  Variant of branched-chain keto acid decarboxylase (kdcA) from Lactococcus lactis
atgtacaccgttggcgactatctgctggaccgtctgcatgaactgggaattgaagaaatctttggcgtgccgggcgattacaatctgcaattcctggatcaaatcattagccgcgaagatatgaaatggattggtaacgcgaatgaactgaatgcgagctacatggctgatggctatgcacgtacgaagaaggcggcggcgttcctgacgaccttcggtgttggtgaactgagcgcaatcaatgggttggcgggcagctatgcagagaacctgccagtcgtggaaatcgttgggagtccgacctcgaaggtgcagaacgatggcaagttcgttcatcacaccctggccgacggcgacttcaagcacttcatgaagatgcacgaaccggtcaccgctgcacgtacactgctgaccgccgagaacgcgacctatgagattgaccgcgtgctgagccaactgctgaaagaacgtaaacctgtgtacatcaacctgccggttgatgtcgccgcggcgaaagccgagaaaccagctctgagcctggagaaagaaagcagcacgaccaacaccacagaacaggtgatcctgtcgaagatcgaagaaagcctgaagaacgcccagaaaccggtcgtgatcgctgggcacgaggtgattagcttcggtctggagaagacggttacgcagtttgtgagtgaaaccaaactgccgattactaccctgaactttggcaaatcggctgtggatgaatccctgccgtccttcctgggtatctacaatggtaaactgagcgagattagcctcaagaactttgtggaaagcgcagacttcatcctgatgcttggtgtgaaactgacggatagcagtacgggcgcgtttacgcaccatctggacgagaacaagatgattagcctgaacattgatgaaggcatcatcttcaacaaagtcgtagaagacttcgatttccgtgcggttgttagcagcctgagcgagctgaaaggcattgaatacgaaggtcagtacattgataagcagtacgaagagttcattccgagcagcgcaccactgcttcaagaccgtctgtggcaagcagtagaatctctgacacagtccaatgaaaccattgtggcggaacagggcacgtcgttcttcggtgcctccaccatcttcctgaagagcaattcacgcttcatcggtcagccgctttggggcagcatcggctatacgtttccggcagcactgggatcacagattgcggataaggaaagtcgccatctgctgttcattggtgatggtagcctgcaactgaccgtgcaggagctgggcctgtcgatccgtgagaaactgaacccgatttgtttcatcatcaacaacgatggctataccgtagagcgcgagattcatgggcctacacagagctacaatgacatcccgatgtggaactatagcaaactgccggaaacctttggcgcgacggaagatcgcgtagttagcaagatcgttcgcacagagaacgagtttgtgagtgtcatgaaagaagcgcaggccgatgttaaccgcatgtattggattgaactggttctggagaaagaagatgcaccgaaactgctgaagaagatggggaagctgtttgcagaacagaacaaa

SEQ ID NO: 20 - protein, 547 aa, Artificial Sequence
  Variant of branched-chain keto acid decarboxylase (kdcA) from Lactococcus lactis
MYTVGDYLLDRLHELGIEEIFGVPGDYNLQFLDQIISREDMKWIGNANELNASYMADGYARTKKAAAFLTTFGVGELSAINGLAGSYAENLPVVEIVGSPTSKVQNDGKFVHHTLADGDFKHFMKMHEPVTAARTLLTAENATYEIDRVLSQLLKERKPVYINLPVDVAAAKAEKPALSLEKESSTTNTTEQVILSKIEESLKNAQKPVVIAGHEVISFGLEKTVTQFVSETKLPITTLNFGKSAVDESLPSFLGIYNGKLSEISLKNFVESADFILMLGVKLTDSSTGAFTHHLDENKMISLNIDEGIIFNKVVEDFDFRAVVSSLSELKGIEYEGQYIDKQYEEFIPSSAPLLQDRLWQAVESLTQSNETIVAEQGTSFFGASTIFLKSNSRFIGQPLWGSIGYTFPAALGSQIADKESRHLLFIGDGSLQLTVQELGLSIREKLNPICFIINNDGYTVEREIHGPTQSYNDIPMWNYSKLPETFGATEDRVVSKIVRTENEFVSVMKEAQADVNRMYWIELVLEKEDAPKLLKKMGKLFAEQNK

SEQ ID NO: 21 - DNA, 1641 bp, Artificial Sequence
  Variant of branched-chain keto acid decarboxylase (kdcA) from Lactococcus lactis
atgtacaccgttggcgactatctgctggaccgtctgcatgaactgggaattgaagaaatctttggcgtgccgggcgattacaatctgcaattcctggatcaaatcattagccgcgaagatatgaaatggattggtaacgcgaatgaactgaatgcgagctacatggctgatggctatgcacgtacgaagaaggcggcggcgttcctgacgaccttcggtgttggtgaactgagcgcaatcaatgggttggcgggcagctatgcagagaacctgccagtcgtggaaatcgttgggagtccgacctcgaaggtgcagaacgatggcaagttcgttcatcacaccctggccgacggcgacttcaagcacttcatgaagatgcacgaaccggtcaccgctgcacgtacactgctgaccgccgagaacgcgacctatgagattgaccgcgtgctgagccaactgctgaaagaacgtaaacctgtgtacatcaacctgccggttgatgtcgccgcggcgaaagccgagaaaccagctctgagcctggagaaagaaagcagcacgaccaacaccacagaacaggtgatcctgtcgaagatcgaagaaagcctgaagaacgcccagaaaccggtcgtgatcgctgggcacgaggtgattagcttcggtctggagaagacggttacgcagtttgtgagtgaaaccaaactgccgattactaccctgaactttggcaaatcggctgtggatgaatccctgccgtccttcctgggtatctacaatggtaaactgagcgagattagcctcaagaactttgtggaaagcgcagacttcatcctgatgcttggtgtgaaactgacggatagcagtacgggcgcgtttacgcaccatctggacgagaacaagatgattagcctgaacattgatgaaggcatcatcttcaacaaagtcgtagaagacttcgatttccgtgcggttgttagcagcctgagcaagctgaaaggcattgaatacgaaggtcagtacattgataagcagtacgaagagttcattccgagcagcgcaccactgagccaagaccgtctgtggcaagcagtagaatctctgacacagtccaatgaaaccattgtggcggaacagggcacgtcgttcttcggtgcctccaccatcttccttaagagcaattcacgcttcatcggtcagccgctttggggcagcatcggctatacgtttccggcagcactgggatcacagattgcggataaggaaagtcgccatctgctgttcattggtgatggtagcctgcaactgaccgtgcaggagctgggcctgtcgatccgtgagaaactgaacccgatttgtttcatcatcaacaacgatggctataccgtagagcgcgagattcatgggcctacacagagctacaatgacatcccgatgtggaactatagcaaactgccggaaacctttggcgcgacggaagatcgcgtagttagcaagatcgttcgcacagagaacgagtttgtgagtgtcatgaaagaagcgcaggccgatgttaaccgcatgtattggattgaactggttctggagaaagaagatgcaccgaaactgctgaagaagatggggaagctgtttgcagaacagaacaaa

SEQ ID NO: 22 - protein, 547 aa, Artificial Sequence
  Variant of branched-chain keto acid decarboxylase (kdcA) from Lactococcus lactis
MYTVGDYLLDRLHELGIEEIFGVPGDYNLQFLDQIISREDMKWIGNANELNASYMADGYARTKKAAAFLTTFGVGELSAINGLAGSYAENLPVVEIVGSPTSKVQNDGKFVHHTLADGDFKHFMKMHEPVTAARTLLTAENATYEIDRVLSQLLKERKPVYINLPVDVAAAKAEKPALSLEKESSTTNTTEQVILSKIEESLKNAQKPVVIAGHEVISFGLEKTVTQFVSETKLPITTLNFGKSAVDESLPSFLGIYNGKLSEISLKNFVESADFILMLGVKLTDSSTGAFTHHLDENKMISLNIDEGIIFNKVVEDFDFRAVVSSLSKLKGIEYEGQYIDKQYEEFIPSSAPLSQDRLWQAVESLTQSNETIVAEQGTSFFGASTIFLKSNSRFIGQPLWGSIGYTFPAALGSQIADKESRHLLFIGDGSLQLTVQELGLSIREKLNPICFIINNDGYTVEREIHGPTQSYNDIPMWNYSKLPETFGATEDRVVSKIVRTENEFVSVMKEAQADVNRMYWIELVLEKEDAPKLLKKMGKLFAEQNK

SEQ ID NO: 23 - DNA, 1641 bp, Artificial Sequence
  Variant of branched-chain keto acid decarboxylase (kdcA) from Lactococcus lactis
atgtacaccgttggcgactatctgctggaccgtctgcatgaactgggaattgaagaaatctttggcgtgccgggcgattacaatctgcaattcctggatcaaatcattagccgcgaagatatgaaatggattggtaacgcgaatgaactgaatgcgagctacatggctgatggctatgcacgtacgaagaaggcggcggcgttcctgacgaccttcggtgttggtgaactgagcgcaatcaatgggttggcgggcagctatgcagagaacctgccagtcgtggaaatcgttgggagtccgacctcgaaggtgcagaacgatggcaagttcgttcatcacaccctggccgacggcgacttcaagcacttcatgaagatgcacgaaccggtcaccgctgcacgtacactgctgaccgccgagaacgcgacctatgagattgaccgcgtgctgagccaactgctgaaagaacgtaaacctgtgtacatcaacctgccggttgatgtcgccgcggcgaaagccgagaaaccagctctgagcctggagaaagaaagcagcacgaccaacaccacagaacaggtgatcctgtcgaagatcgaagaaagcctgaagaacgcccagaaaccggtcgtgatcgctgggcacgaggtgattagcttcggtctggagaagacggttacgcagtttgtgagtgaaaccaaactgccgattactaccctgaactttggcaaatcggctgtggatgaatccctgccgtccttcctgggtatctacaatggtaaactgagcgagattagcctcaagaactttgtggaaagcgcagacttcatcctgatgcttggtgtgaaactgacggatagcagtacgggcgcgtttacgcaccatctggacgagaacaagatgattagcctgaacattgatgaaggcatcatcttcaacaaagtcgtagaagacttcgatttccgtgcggttgttagcagcctgagcgagctgaaaggcattgaatacgaaggtcagtacattgataagcagtacgaagagttcattccgagcagcgcaccactgagccaagaccgtctgtggcaagcagtagaatctctgacacagtccaatgaaaccattgtggcggaacagggcacgtcgttcttcggtgcctccaccatcttcctgaagagcaattcacgcttcatcggtcagccgctttggggcagcatcggctatacgtttccggcagcactgggatcacagattgcggataaggaaagtcgccatctgctgttcattggtgatggtagcctgcaactgaccgtgagtgagctgggcctgtcgatccgtgagaaactgaacccgatttgtttcatcatcaacaacgatggctataccgtagagcgcgagattcatgggcctacacagagctacaatgacatcccgatgtggaactatagcaaactgccggaaacctttggcgcgacggaagatcgcgtagttagcaagatcgttcgcacagagaacgagtttgtgagtgtcatgaaagaagcgcaggccgatgttaaccgcatgtattggattgaactggttctggagaaagaagatgcaccgaaactgctgaagaagatggggaagctgtttgcagaacagaacaaa

SEQ ID NO: 24 - protein, 547 aa, Artificial Sequence
  Variant of branched-chain keto acid decarboxylase (kdcA) from Lactococcus lactis
MYTVGDYLLDRLHELGIEEIFGVPGDYNLQFLDQIISREDMKWIGNANELNASYMADGYARTKKAAAFLTTFGVGELSAINGLAGSYAENLPVVEIVGSPTSKVQNDGKFVHHTLADGDFKHFMKMHEPVTAARTLLTAENATYEIDRVLSQLLKERKPVYINLPVDVAAAKAEKPALSLEKESSTTNTTEQVILSKIEESLKNAQKPVVIAGHEVISFGLEKTVTQFVSETKLPITTLNFGKSAVDESLPSFLGIYNGKLSEISLKNFVESADFILMLGVKLTDSSTGAFTHHLDENKMISLNIDEGIIFNKVVEDFDFRAVVSSLSELKGIEYEGQYIDKQYEEFIPSSAPLSQDRLWQAVESLTQSNETIVAEQGTSFFGASTIFLKSNSRFIGQPLWGSIGYTFPAALGSQIADKESRHLLFIGDGSLQLTVSELGLSIREKLNPICFIINNDGYTVEREIHGPTQSYNDIPMWNYSKLPETFGATEDRVVSKIVRTENEFVSVMKEAQADVNRMYWIELVLEKEDAPKLLKKMGKLFAEQNK

SEQ ID NO: 25 - DNA, 1641 bp, Artificial Sequence
  Variant of branched-chain keto acid decarboxylase (kdcA) from Lactococcus lactis
atgtacaccgttggcgactatctgctggaccgtctgcatgaactgggaattgaagaaatctttggcgtgccgggcgattacaatctgcaattcctggatcaaatcattagccgcgaagatatgaaatggattggtaacgcgaatgaactgaatgcgagctacatggctgatggctatgcacgtacgaagaaggcggcggcgttcctgacgaccttcggtgttggtgaactgagcgcaatcaatgggttggcgggcagctatgcagagaacctgccagtcgtggaaatcgttgggagtccgacctcgaaggtgcagaacgatggcaagttcgttcatcacaccctggccgacggcgacttcaagcacttcatgaagatgcacgaaccggtcaccgctgcacgtacactgctgaccgccgagaacgcgacctatgagattgaccgcgtgctgagccaactgctgaaagaacgtaaacctgtgtacatcaacctgccggttgatgtcgccgcggcgaaagccgagaaaccagctctgagcctggagaaagaaagcagcacgaccaacaccacagaacaggtgatcctgtcgaagatcgaagaaagcctgaagaacgcccagaaaccggtcgtgatcgctgggcacgaggtgattagcttcggtctggagaagacggttacgcagtttgtgagtgaaaccaaactgccgattactaccctgaactttggcaaatcggctgtggatgaatccctgccgtccttcctgggtatctacaatggtaaactgagcgagattagcctcaagaactttgtggaaagcgcagacttcatcctgatgcttggtgtgaaactgacggatagcagtacgggcgcgtttacgcaccatctggacgagaacaagatgattagcctgaacattgatgaaggcatcatcttcaacaaagtcgtagaagacttcgatttccgtgcggttgttagcagcctgagcgagctgaaaggcattgaatacgaaggtcagtacattgataagcagtacgaagagttcattccgagcagcgcaccactgagccaagaccgtctgtggcaagcagtagaatctctgacacagtccaatgaaaccattgtggcggaacagggcacgtcgttcttcggtgcctccaccatcccactgaagagcaattcacgcttcatcggtcagccgctttggggcagcatcggctatacgtttccggcagcactgggatcacagattgcggataaggaaagtcgccatctgctgttcattggtgatggtagcctgcaactgaccgtgcaggagctgggcctgtcgatccgtgagaaactgaacccgatttgtttcatcatcaacaacgatggctataccgtagagcgcgagattcatgggcctacacagagctacaatgacatcccgatgtggaactatagcaaactgccggaaacctttggcgcgacggaagatcgcgtagttagcaagatcgttcgcacagagaacgagtttgtgagtgtcatgaaagaagcgcaggccgatgttaaccgcatgtattggattgaactggttctggagaaagaagatgcaccgaaactgctgaagaagatggggaagctgtttgcagaacagaacaaa

SEQ ID NO: 26 - protein, 547 aa, Artificial Sequence
  Variant of branched-chain keto acid decarboxylase (kdcA) from Lactococcus lactis
MYTVGDYLLDRLHELGIEEIFGVPGDYNLQFLDQIISREDMKWIGNANELNASYMADGYARTKKAAAFLTTFGVGELSAINGLAGSYAENLPVVEIVGSPTSKVQNDGKFVHHTLADGDFKHFMKMHEPVTAARTLLTAENATYEIDRVLSQLLKERKPVYINLPVDVAAAKAEKPALSLEKESSTTNTTEQVILSKIEESLKNAQKPVVIAGHEVISFGLEKTVTQFVSETKLPITTLNFGKSAVDESLPSFLGIYNGKLSEISLKNFVESADFILMLGVKLTDSSTGAFTHHLDENKMISLNIDEGIIFNKVVEDFDFRAVVSSLSELKGIEYEGQYIDKQYEEFIPSSAPLSQDRLWQAVESLTQSNETIVAEQGTSFFGASTIPLKSNSRFIGQPLWGSIGYTFPAALGSQIADKESRHLLFIGDGSLQLTVQELGLSIREKLNPICFIINNDGYTVEREIHGPTQSYNDIPMWNYSKLPETFGATEDRVVSKIVRTENEFVSVMKEAQADVNRMYWIELVLEKEDAPKLLKKMGKLFAEQNK

SEQ ID NO: 27 - DNA, 1641 bp, Artificial Sequence
  Variant of branched-chain keto acid decarboxylase (kdcA) from Lactococcus lactis
atgtacaccgttggcgactatctgctggaccgtctgcatgaactgggaattgaagaaatctttggcgtgccgggcgattacaatctgcaattcctggatcaaatcattagccgcgaagatatgaaatggattggtaacgcgaatgaactgaatgcgagctacatggctgatggctatgcacgtacgaagaaggcggcggcgttcctgacgaccttcggtgttggtgaactgagcgcaatcaatgggttggcgggcagctatgcagagaacctgccagtcgtggaaatcgttgggagtccgacctcgaaggtgcagaacgatggcaagttcgttcatcacaccctggccgacggcgacttcaagcacttcatgaagatgcacgaaccggtcaccgctgcacgtacactgctgaccgccgagaacgcgacctatgagattgaccgcgtgctgagccaactgctgaaagaacgtaaacctgtgtacatcaacctgccggttgatgtcgccgcggcgaaagccgataaaccagctctgagcctggagaaagaaagcagcacgaccaacaccacagaacaggtgatcctgtcgaagatcgaagaaagcctgaagaacgcccagaaaccggtcgtgatcgctgggcacgaggtgattagcttcggtctggagaagacggttacgcagtttgtgagtgaaaccaaactgccgattactaccctgaactttggcaaatcggctgtggatgaatccctgccgtccttcctgggtatctacaatggtaaactgagcgagattagcctcaagaactttgtggaaagcgcagacttcatcctgatgcttggtgtgaaactgacggatagcagtacgggcgcgtttacgcaccatctggacgagaacaagatgattagcctgaacattgatgaaggcatcatcttcaacaaagtcgtagaagacttcgatttccgtgcggttgttagcagcctgagcgagctgaaaggcattgaatacgaaggtcagtacattgataagcagtacgaagagttcattccgagcagcgcaccactgagccaagaccgtctgtggcaagcagtagaatctctgacacagtccaatgaaaccattgtggcggaacagggcacgtcgttcttcggtgcctccaccatcttcctgaagagcaattcacgcttcatcggtcagccgctttggggcagcatcggctatacgtttccggcagcactgggatcacagattgcggataaggaaagtcgccatctgctgttcattggtgatggtagcctgcaactgaccgtgcaggagctgggcctgtcgatccgtgagaaactgaacccgatttgtttcaccatcaacaacgatggctataccgtagagcgcgagattcatgggcctacacagagctacaatgacatcccgatgtggaactatagcaaactgccggaaacctttggcgcgacggaagatcgcgtagttagcaagatcgttcgcacagagaacgagtttgtgagtgtcatgaaagaagcgcaggccgatgttaaccgcatgtattggattgaactggttctggagaaagaagatgcaccgaaactgctgaagaagatggggaagctgtttgcagaacagaacaaa

SEQ ID NO: 28 - protein, 547 aa, Artificial Sequence
  Variant of branched-chain keto acid decarboxylase (kdcA) from Lactococcus lactis
MYTVGDYLLDRLHELGIEEIFGVPGDYNLQFLDQIISREDMKWIGNANELNASYMADGYARTKKAAAFLTTFGVGELSAINGLAGSYAENLPVVEIVGSPTSKVQNDGKFVHHTLADGDFKHFMKMHEPVTAARTLLTAENATYEIDRVLSQLLKERKPVYINLPVDVAAAKADKPALSLEKESSTTNTTEQVILSKIEESLKNAQKPVVIAGHEVISFGLEKTVTQFVSETKLPITTLNFGKSAVDESLPSFLGIYNGKLSEISLKNFVESADFILMLGVKLTDSSTGAFTHHLDENKMISLNIDEGIIFNKVVEDFDFRAVVSSLSELKGIEYEGQYIDKQYEEFIPSSAPLSQDRLWQAVESLTQSNETIVAEQGTSFFGASTIFLKSNSRFIGQPLWGSIGYTFPAALGSQIADKESRHLLFIGDGSLQLTVQELGLSIREKLNPICFTINNDGYTVEREIHGPTQSYNDIPMWNYSKLPETFGATEDRVVSKIVRTENEFVSVMKEAQADVNRMYWIELVLEKEDAPKLLKKMGKLFAEQNK

SEQ ID NO: 29 - DNA, 1641 bp, Artificial Sequence
  Variant of branched-chain keto acid decarboxylase (kdcA) from Lactococcus lactis
atgtacaccgttggcgactatctgctggaccgtctgcatgaactgggaattgaagaaatctttggcgtgccgggcgattacaatctgcaattcctggatcaaatcattagccgcgaagatatgaaatggattggtaacgcgaatgaactgaatgcgagctacatggctgatggctatgcacgtacgaagaaggcggcggcgttcctgacgaccttcggtgttggtgaactgagcgcaatcaatgggttggcgggcagctatgcagagaacctgccagtcgtggaaatcgttgggagtccgacctcgaaggtgcagaacgatggcaagttcgttcatcacaccctggccgacggcgacttcaagcacttcatgaagatgcacgaaccggtcaccgctgcacgtacactgctgaccgccgagaacgcgaccccagagattgaccgcgtgctgagccaactgctgaaagaacgtaaacctgtgtacatcaacctgccggttgatgtcgccgcggcgaaagccgagaaaccagctctgagcctggagaaagaaaatagcacgaccaacaccacagaacaggtgatcctgtcgaagatcgaagaaagcctgaagaacgcccagaaaccggtcgtgatcgctgggcacgaggtgattagcttcggtctggagaagacggttacgcagtttgtgagtgaaaccaaactgccgattactaccctgaactttggcaaatcggctgtggatgaatccctgccgtccttcctgggtatctacaatggtaaactgagcgagattagcctcaagaactttgtggaaagcgcagacttcatcctgatgcttggtgtgaaactgacggatagcagtacgggcgcgtttacgcaccatctggacgagaacaagatgattagcctgaacattgatgaaggcatcatcttcaacaaagtcgtagaagacttcgatttccgtgcggttgttagcagcctgagcgagctgaaaggcattgaatacgaaggtcagtacattgataagcagtacgaagagttcattccgagcagcgcaccactgagccaagaccgtctgtggcaagcagtagaatctctgacacagtccaatgaaaccattgtggcggaacagggcacgtcgttcttcggtgcctccaccatcttcctgaagagcaattcacgcttcatcggtcagccgctttggggcagcatcggctatacgtttccggcagcactgggatcacagattgcggataaggaaagtcgccatctgctgttcattggtgatggtagcctgcaactgaccgtgcaggagctgggcctgtcgatccgtgagaaactgaacccgatttgtttcatcatcaacaacgatggctataccgtagagcgcgagattcatgggcctacacagagctacaatgacatcccgatgtggaactatagcaaactgccggaaacctttggcgcgacggaagatcgcgtagttagcaagatcgttcgcacagagaacgagtttgtgagtgtcatgaaagaagcgcaggccgatgttaaccgcatgtattggattgaactggttctggagaaagaagatgcaccgaaactgctgaagaagatggggaagctgtttgcagaacagaacaaa

SEQ ID NO: 30 - protein, 547 aa, Artificial Sequence
  Variant of branched-chain keto acid decarboxylase (kdcA) from Lactococcus lactis
MYTVGDYLLDRLHELGIEEIFGVPGDYNLQFLDQIISREDMKWIGNANELNASYMADGYARTKKAAAFLTTFGVGELSAINGLAGSYAENLPVVEIVGSPTSKVQNDGKFVHHTLADGDFKHFMKMHEPVTAARTLLTAENATPEIDRVLSQLLKERKPVYINLPVDVAAAKAEKPALSLEKENSTTNTTEQVILSKIEESLKNAQKPVVIAGHEVISFGLEKTVTQFVSETKLPITTLNFGKSAVDESLPSFLGIYNGKLSEISLKNFVESADFILMLGVKLTDSSTGAFTHHLDENKMISLNIDEGIIFNKVVEDFDFRAVVSSLSELKGIEYEGQYIDKQYEEFIPSSAPLSQDRLWQAVESLTQSNETIVAEQGTSFFGASTIFLKSNSRFIGQPLWGSIGYTFPAALGSQIADKESRHLLFIGDGSLQLTVQELGLSIREKLNPICFIINNDGYTVEREIHGPTQSYNDIPMWNYSKLPETFGATEDRVVSKIVRTENEFVSVMKEAQADVNRMYWIELVLEKEDAPKLLKKMGKLFAEQNK

SEQ ID NO: 31 - DNA, 1641 bp, Artificial Sequence
  Variant of branched-chain keto acid decarboxylase (kdcA) from Lactococcus lactis
atgtacaccgttggcgactatctgctggaccgtctgcatgaactgggaattgaagaaatctttggcgtgccgggcgattacaatctgcaattcctggatcaaatcattagccgcgaagatatgaaatggattggtaacgcgaatgaactgaatgcgagctacatggctgatggctatgcacgtacgaagaaggcggcggcgttcctgacgaccttcggtgttggtgaactgagcgcaatcaatgggttggcgggcagctatgcagagaacctgccagtcgtggaaatcgttgggagtccgacctcgaaggtgcagaacgatggcaagttcgttcatcacaccctggccgacggcgacttcaagcacttcatgaagatgcacgaaccggtcaccgctgcacgtacactgctgaccgccgagaacgcgacctatgagattgaccgcgtgctgagccaactgctgaaagaacgtaaacctgtgtacatcaacctgccggttgatgtcgccgcggcgaaagccgagaaaccagctctgagcctggagaaagaaagcagcacgaccaacaccacagaacaggtgatcctgtcgaagatcgaagaaagcctgaagaacgcccagaaaccggtcgtgatcgctgggcacgaggtgattagcttcggtctggagaagacggttacgcagtttgtgagtgaaaccaaactgccgattactaccctgaactttggcaaatcggctgtggatgaatccctgccgtccttcctgggtatctacaatggtaaactgagcgagattagcctcaagaactttgtggaaagcgcagacttcatcctgatgcttggtgtgaaactgacggatagcagtacgggcgcgtttacgcaccatctggacgagaacaagatgattagcctgaacattgatgaaggcatcatcttcaacaaagtcgtagaagacttcgatttccgtgcggttgttagcagcctgagcgagctgaaaggcattgaatacgaaggtcagtacattgataagcagtacgaagagttcattccgagcagcgcaccactgagccaagaccgtctgtggcaagcagtagaatctctgacacagtccaatgaaaccattgtggcggaacagggcacgtcgttcttcggtgcctccaccatcttcctgaagagcaattcacgcttcatcggtcagccgctttggggcagcatcggctatacgtttccggcagcactgggatcacagattgcggatgatgaaagtcgccatctgctgttcattggtgatggtagcctgcaactgaccgtgcaggagctgggcctgtcgatccgtgagaaactgaacccgatttgtttcatcatcaacaacgatggctataccgtagagcgcgagattcatgggcctacacagagctacaatgacatcccgatgtggaactatagcaaactgccggaaacctttggcgcgacggaagatcgcgtagttagcaagatcgttcgcacagagaacgagtttgtgagtgtcatgaaagaagcgcaggccgatgttaaccgcatgtattggattgaactggttctggagaaagaagatgcaccgaaactgctgaagaagatggggaagctgtttgcagaacagaacaaa

SEQ ID NO: 32 - protein, 547 aa, Artificial Sequence
  Variant of branched-chain keto acid decarboxylase (kdcA) from Lactococcus lactis
MYTVGDYLLDRLHELGIEEIFGVPGDYNLQFLDQIISREDMKWIGNANELNASYMADGYARTKKAAAFLTTFGVGELSAINGLAGSYAENLPVVEIVGSPTSKVQNDGKFVHHTLADGDFKHFMKMHEPVTAARTLLTAENATYEIDRVLSQLLKERKPVYINLPVDVAAAKAEKPALSLEKESSTTNTTEQVILSKIEESLKNAQKPVVIAGHEVISFGLEKTVTQFVSETKLPITTLNFGKSAVDESLPSFLGIYNGKLSEISLKNFVESADFILMLGVKLTDSSTGAFTHHLDENKMISLNIDEGIIFNKVVEDFDFRAVVSSLSELKGIEYEGQYIDKQYEEFIPSSAPLSQDRLWQAVESLTQSNETIVAEQGTSFFGASTIFLKSNSRFIGQPLWGSIGYTFPAALGSQIADDESRHLLFIGDGSLQLTVQELGLSIREKLNPICFIINNDGYTVEREIHGPTQSYNDIPMWNYSKLPETFGATEDRVVSKIVRTENEFVSVMKEAQADVNRMYWIELVLEKEDAPKLLKKMGKLFAEQNK

SEQ ID NO: 33 - DNA, 1641 bp, Artificial Sequence
  Variant of branched-chain keto acid decarboxylase (kdcA) from Lactococcus lactis
atgtacaccgttggcgactatctgctggaccgtctgcatgaactgggaattgaagaaatctttggcgtgccgggcgattacaatctgcaattcctggatcaaatcattagccgcgaagatatgaaatggattggtaacgcgaatgaactgaatgcgagctacatggctgatggctatgcacgtacgaagaaggcggcggcgttcctgacgaccttcggtgttggtgaactgagcgcaatcaatgggttggcgggcagctatgcagagaacctgccagtcgtggaaatcgttgggagtccgacctcgaaggtgcagaacgatggcaagttcgttcatcacaccctggccgacggcgacttcaagcacttcatgaagatgcacgaaccggtcaccgctgcacgtacactgctgaccgccgagaacgcgacctatgagattgaccgcgtgctgagccaactgctgaaagaacgtaaacctgtgtacatcaacctgccggttgatgtcgccgcggcgaaagccgagaaaccagctctgagcctggagaaagaaagcagcacgaccaacaccacagaacaggtgatcctgtcgaagatcgaagaaagcctgaagaacgcccagaaaccggtcgtgatcgctgggcacgaggtgattagcttcggtctggagaagacggttacgcagtttgtgagtgaaaccaaactgccgattactaccctgaactttggcaaatcggctgtggatgaatccctgccgtccttcctgggtatctacaatggtaaactgagcgagattagcctcaagaactttgtggaaagcgcagacttcatcctgatgcttggtgtgaaactgacggatagcagtacgggcgcgtttacgcaccatctggacgagaacaagatgattagcctgaacattgatgaaggcatcatcttcaacaaagtcgtagaagacttcgatttccgtgcggttgttagcagcctgagcgagctgaaaggcattgaatacgaaggtcagtacattgataagcagtacgaagagttcattccgagcagcgcaccactgagccaagaccgtctgtggcaagcagtagaatctctgacacagtccaatgaaaccattgtggcggaacagggcacgtcgttcttcggtgcctccaccatcttcctgaagagcaattcacgcttcatcggtcagccgctttggggcagcatcggctatacgtttccggcagcactgggatcacagattgcggataaggaaagtcgccatctgctgttcattggtgatggtagcctgcaactgaccgtgcaggagctgggcctgtcgatccgtgagaaactgaacccgatttgtttcatcatcaacaacgatggctataccgtagagcgcgagattcatgggcctacacagagctacaatgacatcccgatgtggaactatagcaaactgccggaaacctttggcgcgacggaagatcgcgtagttagcaagatcgttcgcacagagaacgagtttgtgagtgtcatgtttgaagcgcaggccgatgttaaccgcatgtattggattgaactggttctggagaaagaagatgcaccgaaactgctgaagaagatggggaagctgtttgcagaacagaacaaa

SEQ ID NO: 34 - protein, 547 aa, Artificial Sequence
  Variant of branched-chain keto acid decarboxylase (kdcA) from Lactococcus lactis
MYTVGDYLLDRLHELGIEEIFGVPGDYNLQFLDQIISREDMKWIGNANELNASYMADGYARTKKAAAFLTTFGVGELSAINGLAGSYAENLPVVEIVGSPTSKVQNDGKFVHHTLADGDFKHFMKMHEPVTAARTLLTAENATYEIDRVLSQLLKERKPVYINLPVDVAAAKAEKPALSLEKESSTTNTTEQVILSKIEESLKNAQKPVVIAGHEVISFGLEKTVTQFVSETKLPITTLNFGKSAVDESLPSFLGIYNGKLSEISLKNFVESADFILMLGVKLTDSSTGAFTHHLDENKMISLNIDEGIIFNKVVEDFDFRAVVSSLSELKGIEYEGQYIDKQYEEFIPSSAPLSQDRLWQAVESLTQSNETIVAEQGTSFFGASTIFLKSNSRFIGQPLWGSIGYTFPAALGSQIADKESRHLLFIGDGSLQLTVQELGLSIREKLNPICFIINNDGYTVEREIHGPTQSYNDIPMWNYSKLPETFGATEDRVVSKIVRTENEFVSVMFEAQADVNRMYWIELVLEKEDAPKLLKKMGKLFAEQNK

SEQ ID NO: 35 - DNA, 1641 bp, Artificial Sequence
  Variant of branched-chain keto acid decarboxylase (kdcA) from Lactococcus lactis
atgtacaccgttggcgactatctgctggaccgtctgcatgaactgggaattgaagaaatctttggcgtgccgggcgattacaatctgcaattcctggatcaaatcattagccgcgaagatatgaaatggattggtaacgcgaatgaactgaatgcgagctacatggctgatggctatgcacgtacgaagaaggcggcggcgttcctgacgaccttcggtgttggtgaactgagcgcaatcaatgggttggcgggcagctatgcagagaacctgccagtcgtggaaatcgttgggagtccgacctcgaaggtgcagaacgatggcaagttcgttcatcacaccctggccgacggcgacttccttcacttcatgaagatgcacgaaccggtcaccgctgcacgtacactgctgaccgccgagaacgcgacctatgagattgaccgcgtgctgagccaactgctgaaagaacgtaaacctgtgtacatcaacctgccggttgatgtcgccgcggcgaaagccgagaaaccagctctgagcctggagaaagaaagcagcacgaccaacaccacagaacaggtgatcctgtcgaagatcgaagaaagcctgaagaacgcccagaaaccggtcgtgatcgctgggcacgaggtgattagcttcggtctggagaagacggttacgcagtttgtgagtgaaaccaaactgccgattactaccctgaactttggcaaatcggctgtggatgaatccctgccgtccttcctgggtatctacaatggtaaactgagcgagattagcctcaagaactttgtggaaagcgcagacttcatcctgatgcttggtgtgaaactgacggatagcagtacgggcgcgtttacgcaccacctggacgagaacaagatgattagcctgaacattgatgaaggcatcatcttcaacaaagtcgtagaagacttcgatttccgtgcggttgttagcagcctgagcgagctgagtggcattgaatacgaaggtcagtacattgataagcagtacgaagagttcattccgagctcagcaccactgagccaagaccgtctgtggcaagcagtagaatctctgacacagtccaatgaaaccattgtggcggaacagggcacgtcgttcttcggtgcctccaccatcttcctgaagagcaattcacgcttcatcggtcagccgctttggggcagcatcggctatacgtttccggcagcactgggatcacagattgcggataaggaaagtcgccatctgctgttcattggtgatggtagcctgcaactgaccgtgcaggagctgggcctgtcgatccgtgagaaactgaacccgatttgtttcatcatcaacaacgatggctataccgtagagcgcgagattcatgggcctacacagagctacaatgacatcccgatgtggaactatagcaaactgccggaaacctttggcgcgacggaagaccgcgtagttagcaagatcgttcgcacagagaacgagtttgtgagtgtcatgaaagaagcgcaggccgatgttaaccgcatgtattggattgaactggttctggagaaagaagatgcaccgaaactgctgaagaagatggggaagctgtttgcagaacagaacaaa

SEQ ID NO: 36 - protein, 547 aa, Artificial Sequence
  Variant of branched-chain keto acid decarboxylase (kdcA) from Lactococcus lactis
MYTVGDYLLDRLHELGIEEIFGVPGDYNLQFLDQIISREDMKWIGNANELNASYMADGYARTKKAAAFLTTFGVGELSAINGLAGSYAENLPVVEIVGSPTSKVQNDGKFVHHTLADGDFLHFMKMHEPVTAARTLLTAENATYEIDRVLSQLLKERKPVYINLPVDVAAAKAEKPALSLEKESSTTNTTEQVILSKIEESLKNAQKPVVIAGHEVISFGLEKTVTQFVSETKLPITTLNFGKSAVDESLPSFLGIYNGKLSEISLKNFVESADFILMLGVKLTDSSTGAFTHHLDENKMISLNIDEGIIFNKVVEDFDFRAVVSSLSELSGIEYEGQYIDKQYEEFIPSSAPLSQDRLWQAVESLTQSNETIVAEQGTSFFGASTIFLKSNSRFIGQPLWGSIGYTFPAALGSQIADKESRHLLFIGDGSLQLTVQELGLSIREKLNPICFIINNDGYTVEREIHGPTQSYNDIPMWNYSKLPETFGATEDRVVSKIVRTENEFVSVMKEAQADVNRMYWIELVLEKEDAPKLLKKMGKLFAEQNK

SEQ ID NO: 37 - DNA, 1641 bp, Artificial Sequence
  Variant of branched-chain keto acid decarboxylase (kdcA) from Lactococcus lactis
atgtacaccgttggcgactatctgctggaccgtctgcatgaactgggaattgaagaaatctttggcgtgccgggcgattacaatctgcaattcctggatcaaatcattgcgcgcgaagatatgaaatggattggtaacgcgaatgaactgaatgcgagctacatggctgatggctatgcacgtacgaagaaggcggcggcgttcctgacgaccttcggtgttggtgaactgagcgcaatcaatgggttggcgggcagctatgcagagaacctgccagtcgtggaaatcgttgggagtccgacctcgaaggtgcagaacgatggcaagttcgttcatcacaccctggccgacggcgacttcaagcacttcatgaagatgcacgaaccggtcaccgctgcacgtacactgctgaccgccgagaacgcgaccacagagattgaccgcgtgctgagccaactgctgaaagaacgtaaacctgtgtacatcaacctgccggttgatgtcgccgcggcgaaagccgagaaaccagctctgagcctggagaaagaaagcagcacgaccaacaccacagaacaggtgatcctgtcgaagatcgaagaaagcctgaagaacgcccagaaaccggtcgtgatcgctgggcacgaggtgattagcttcggtctggagaagacggttacgcagtttgtgagtgaaaccaaactgccgattactaccctgaactttggcaaatcggctgtggatgaatccctgccgtccttcctgggtatctacaatggtaaactgagcgagattagcctcaagaactttgtggaaagcgcagacttcatcctgatgcttggtgtgaaactgacggatagcagtacgggcgcgtttacgcaccatctggacgagaacaagatgattagcctgaacattgatgaaggcatcatcttcaacaaagtcgtagaagacttcgatttccgtgcggttgttagcagcctgagcgagctgaaaggcattgaatacgaaggtcagtacattgataagcagtacgaagagttcattccgagcagcgcaccactgagccaagaccgtctgtggcaagcagtagaatctctgacacagtccaatgaaaccattgtggcggaacagggcacgtcgttcttcggtgcctccaccatcttcctgaagagcaattcacgcttcatcggtcagccgctttggggcagcatcggctatacgtttccggcagcactgggatcacagattgcggataaggaaagtcgccatctgctgttcattggtgatggtagcctgcaactgaccgtgcaggagctgggcctggcgatccgtgagaaactgaacccgatttgtttcatcatcaacaacgatggctataccgtagagcgcgagattcatgggcctacacagagctacaatgacatcccgatgtggaactatagcaaactgccggaaacctttggcgcgacggaagatcgcgtagttagcaagatcgttcgcacagagaacgagtttgtgagtgtcatgaaagaagcgcaggccgatgttaaccgcatgtattggattgaactggttctggagaaagaagatgcaccgaaactgctgaagaagatggggaagctgtttgcagaacagaacaaa

SEQ ID NO: 38 - protein, 547 aa, Artificial Sequence
  Variant of branched-chain keto acid decarboxylase (kdcA) from Lactococcus lactis
MYTVGDYLLDRLHELGIEEIFGVPGDYNLQFLDQIIAREDMKWIGNANELNASYMADGYARTKKAAAFLTTFGVGELSAINGLAGSYAENLPVVEIVGSPTSKVQNDGKFVHHTLADGDFKHFMKMHEPVTAARTLLTAENATTEIDRVLSQLLKERKPVYINLPVDVAAAKAEKPALSLEKESSTTNTTEQVILSKIEESLKNAQKPVVIAGHEVISFGLEKTVTQFVSETKLPITTLNFGKSAVDESLPSFLGIYNGKLSEISLKNFVESADFILMLGVKLTDSSTGAFTHHLDENKMISLNIDEGIIFNKVVEDFDFRAVVSSLSELKGIEYEGQYIDKQYEEFIPSSAPLSQDRLWQAVESLTQSNETIVAEQGTSFFGASTIFLKSNSRFIGQPLWGSIGYTFPAALGSQIADKESRHLLFIGDGSLQLTVQELGLAIREKLNPICFIINNDGYTVEREIHGPTQSYNDIPMWNYSKLPETFGATEDRVVSKIVRTENEFVSVMKEAQADVNRMYWIELVLEKEDAPKLLKKMGKLFAEQNK

SEQ ID NO: 39 - DNA, 1641 bp, Artificial Sequence
  Variant of branched-chain keto acid decarboxylase (kdcA) from Lactococcus lactis
atgtacaccgttggcgactatctgctggaccgtctgcatgaactgggaattgaagaaatctttggcgtgccgggcgattacaatctgcaattcctggatcaaatcattagccgcgaagatatgaaatggattggtaacgcgaatgaactgaatgcgagctacatggctgatggctatgcacgtacgaagaaggcggcggcgttcctgacgaccttcggtgttggtgaactgagcgcaatcaatgggttggcgggcagctatgcagagaacctgccagtcgtggaaatcgttgggagtccgacctcgaaggtgcagaacgatggcaagttcgttcatcacaccctggccgacggcgacttcaagcacttcatgaagatgcacgaaccggtcaccgctgcacgtacactgctgaccgccgagaacgcgacctatgagattgaccgcgtgctgagccaactgctgaaagaacgtaaacctgtgtacatcaacctgccggttgatgtcgccgcggcgaaagccgagaaaccagctctgagcctggagaaagaaagcagcacgttaaacaccacagaacaggtgatcctgtcgaagatcgaagaaagcctgaagaacgcccagaaaccggtcgtgatcgctgggcacgaggtgattagcttcggtctggagaagacggttacgcagtttgtgagtgaaaccaaactgccgattactaccctgaactttggcaaatcggctgtggatgaatccctgccgtccttcctgggtatctacaatggtaaactgagcgagattagcctcaagaactttgtggaaagcgcagacttcatcctgatgcttggtgtgaaactgacggatagcagtacgggcgcgtttacgcaccatctggacgagaacaagatgattagcctgaacattgatgaaggcatcatcttcaacaaagtcgtagaagacttcgatttccgtgcggttgttagcagcctgagcgagctgaaaggcattgaatacgaaggtgaatacattgataagcagtacgaagagttcattccgagcagcgcaccactgagccaagaccgtctgtggcaagcagtagaatctctgacacagtccaatgaaaccattgtggcggaacagggcacgtcgttcttcggtgcctccaccatcccactgaagagcaattcacgcttcatcggtcagccgctttggggcagcatcggctatacgtttccggcagcactgggatcacagattgcggataaggaaagtcgccatctgctgttcattggtgatggtagcctgcaactgaccgtgcaggagctgggcctggcgatccgtgagaaactgaacccgatttgtttcatcatcaacaacgatggctataccgtagagcgcgagattcatgggcctacacagagctacaatgacatcccgatgtggaactatagcaaactgccggaaacctttggcgcgacggaagatcgcgtagttagcaagatcgttcgcacagagaacgagtttgtgagtgtcatgaaagaagcgcaggccgatgttaaccgcatgtattggattgaactggttctggagaaagaagatgcaccgaaactgctgaagaagatggggaagctgtttgcagaacagaacaaa

SEQ ID NO: 40 - protein, 547 aa, Artificial Sequence
  Variant of branched-chain keto acid decarboxylase (kdcA) from Lactococcus lactis
MYTVGDYLLDRLHELGIEEIFGVPGDYNLQFLDQIISREDMKWIGNANELNASYMADGYARTKKAAAFLTTFGVGELSAINGLAGSYAENLPVVEIVGSPTSKVQNDGKFVHHTLADGDFKHFMKMHEPVTAARTLLTAENATYEIDRVLSQLLKERKPVYINLPVDVAAAKAEKPALSLEKESSTLNTTEQVILSKIEESLKNAQKPVVIAGHEVISFGLEKTVTQFVSETKLPITTLNFGKSAVDESLPSFLGIYNGKLSEISLKNFVESADFILMLGVKLTDSSTGAFTHHLDENKMISLNIDEGIIFNKVVEDFDFRAVVSSLSELKGIEYEGEYIDKQYEEFIPSSAPLSQDRLWQAVESLTQSNETIVAEQGTSFFGASTIPLKSNSRFIGQPLWGSIGYTFPAALGSQIADKESRHLLFIGDGSLQLTVQELGLAIREKLNPICFIINNDGYTVEREIHGPTQSYNDIPMWNYSKLPETFGATEDRVVSKIVRTENEFVSVMKEAQADVNRMYWIELVLEKEDAPKLLKKMGKLFAEQNK

SEQ ID NO: 41 - DNA, 1641 bp, Artificial Sequence
  Variant of branched-chain keto acid decarboxylase (kdcA) from Lactococcus lactis
atgtacaccgttggcgactatctgctggaccgtctgcatgaactgggaattgaagaaatctttggcgtgccgggcgattacaatctgcaattcctggatcaaatcattgcgcgcgaagatatgaaatggattggtaacgcgaatgaactgaatgcgagctacatggctgatggctatgcacgtacgaagaaggcggcggcgttcctgacgaccttcggtgttggtgaactgagcgcaatcaatgggttggcgggcagctatgcagagaacctgccagtcgtggaaatcgttgggagtccgacctcgaaggtgcagaacgatggcaagttcgttcatcacaccctggccgacggcgacttcaagcacttcatgaagatgcacgaaccggtcaccgctgcacgtacactgctgaccgccgagaacgcgaccacagagattgaccgcgtgctgagccaactgctgaaagaacgtaaacctgtgtacatcaacctgccggttgatgtcgccgcggcgaaagccgagaaaccagctctgagcctggagaaagaaagcagcacgttaaacaccacagaacaggtgatcctgtcgaagatcgaagaaagcctgaagaacgcccagaaaccggtcgtgatcgctgggcacgaggtgattagcttcggtctggagaagacggttacgcagtttgtgagtgaaaccaaactgccgattactaccctgaactttggcaaatcggctgtggatgaatccctgccgtccttcctgggtatctacaatggtaaactgagcgagattagcctcaagaactttgtggaaagcgcagacttcatcctgatgcttggtgtgaaactgacggatagcagtacgggcgcgtttacgcaccatctggacgagaacaagatgattagcctgaacattgatgaaggcatcatcttcaacaaagtcgtagaagacttcgatttccgtgcggttgttagcagcctgagcgagctgaaaggcattgaatacgaaggtcagtacattgataagcagtacgaagagttcattccgagcagcgcaccactgagccaagaccgtctgtggcaagcagtagaatctctgacacagtccaatgaaaccattgtggcggaacagggcacgtcgttcttcggtgcctccaccatcttcctgaagagcaattcacgcttcatcggtcagccgctttggggcagcatcggctatacgtttccggcagcactgggatcacagattgcggataaggaaagtcgccatctgctgttcattggtgatggtagcctgcaactgaccgtgcaggagctgggcctgtcgatccgtgagaaactgaacccgatttgtttcatcatcaacaacgatggctataccgtagagcgcgagattcatgggcctacacagagctacaatgacatcccgatgtggaactatagcaaactgccggaaacctttggcgcgacggaagatcgcgtagttagcaagatcgttcgcacagagaacgagtttgtgagtgtcatgaaagaagcgcaggccgatgttaaccgcatgtattggattgaactggttctggagaaagaagatgcaccgaaactgctgaagaagatggggaagctgtttgcagaacagaacaaa

SEQ ID NO: 42 - protein, 547 aa, Artificial Sequence
  Variant of branched-chain keto acid decarboxylase (kdcA) from Lactococcus lactis
MYTVGDYLLDRLHELGIEEIFGVPGDYNLQFLDQIIAREDMKWIGNANELNASYMADGYARTKKAAAFLTTFGVGELSAINGLAGSYAENLPVVEIVGSPTSKVQNDGKFVHHTLADGDFKHFMKMHEPVTAARTLLTAENATTEIDRVLSQLLKERKPVYINLPVDVAAAKAEKPALSLEKESSTLNTTEQVILSKIEESLKNAQKPVVIAGHEVISFGLEKTVTQFVSETKLPITTLNFGKSAVDESLPSFLGIYNGKLSEISLKNFVESADFILMLGVKLTDSSTGAFTHHLDENKMISLNIDEGIIFNKVVEDFDFRAVVSSLSELKGIEYEGQYIDKQYEEFIPSSAPLSQDRLWQAVESLTQSNETIVAEQGTSFFGASTIFLKSNSRFIGQPLWGSIGYTFPAALGSQIADKESRHLLFIGDGSLQLTVQELGLSIREKLNPICFIINNDGYTVEREIHGPTQSYNDIPMWNYSKLPETFGATEDRVVSKIVRTENEFVSVMKEAQADVNRMYWIELVLEKEDAPKLLKKMGKLFAEQNK

SEQ ID NO: 43 - DNA, 1641 bp, Artificial Sequence
  Variant of branched-chain keto acid decarboxylase (kdcA) from Lactococcus lactis
atgtacaccgttggcgactatctgctggaccgtctgcatgaactgggaattgaagaaatctttggcgtgccgggcgattacaatctgcaattcctggatcaaatcattgcgcgcgaagatatgaaatggattggtaacgcgaatgaactgaatgcgagctacatggctgatggctatgcacgtacgaagaaggcggcggcgttcctgacgaccttcggtgttggtgaactgagcgcaatcaatgggttggcgggcagctatgcagagaacctgccagtcgtggaaatcgttgggagtccgacctcgaaggtgcagaacgatggcaagttcgttcatcacaccctggccgacggcgacttcaagcacttcatgaagatgcacgaaccggtcaccgctgcacgtacactgctgaccgccgagaacgcgacctatgagattgaccgcgtgctgagccaactgctgaaagaacgtaaacctgtgtacatcaacctgccggttgatgtcgccgcggcgaaagccgagaaaccagctctgagcctggagaaagaaagcagcacgaccaacaccacagaacaggtgatcctgtcgaagatcgaagaaagcctgaagaacgcccagaaaccggtcgtgatcgctgggcacgaggtgattagcttcggtctggagaagacggttacgcagtttgtgagtgaaaccaaactgccgattactaccctgaactttggcaaatcggctgtggatgaatccctgccgtccttcctgggtatctacaatggtaaactgagcgagattagcctcaagaactttgtggaaagcgcagacttcatcctgatgcttggtgtgaaactgacggatagcagtacgggcgcgtttacgcaccatctggacgagaacaagatgattagcctgaacattgatgaaggcatcatcttcaacaaagtcgtagaagacttcgatttccgtgcggttgttagcagcctgagcgagctgaaaggcattgaatacgaaggtcaatacattgataagcagtacgaagagttcattccgagcagcgcaccactgagccaagaccgtctgtggcaagcagtagaatctctgacacagtccaatgaaaccattgtggcggaacagggcacgtcgttcttcggtgcctccaccatcttcctgaagagcaattcacgcttcatcggtcagccgctttggggcagcatcggctatacgtttccggcagcactgggatcacagattgcggataaggaaagtcgccatctgctgttcattggtgatggtagcctgcaactgaccgtgcaggagctgggcctggcgatccgtgagaaactgaacccgatttgtttcatcatcaacaacgatggctataccgtagagcgcgagattcatgggcctacacagagctacaatgacatcccgatgtggaactatagcaaactgccggaaacctttggcgcgacggaagatcgcgtagttagcaagatcgttcgcacagagaacgagtttgtgagtgtcatgaaagaagcgcaggccgatgttaaccgcatgtattggattgaactggttctggagaaagaagatgcaccgaaactgctgaagaagatggggaagctgtttgcagaacagaacaaa

SEQ ID NO: 44 - protein, 547 aa, Artificial Sequence
  Variant of branched-chain keto acid decarboxylase (kdcA) from Lactococcus lactis
MYTVGDYLLDRLHELGIEEIFGVPGDYNLQFLDQIIAREDMKWIGNANELNASYMADGYARTKKAAAFLTTFGVGELSAINGLAGSYAENLPVVEIVGSPTSKVQNDGKFVHHTLADGDFKHFMKMHEPVTAARTLLTAENATYEIDRVLSQLLKERKPVYINLPVDVAAAKAEKPALSLEKESSTTNTTEQVILSKIEESLKNAQKPVVIAGHEVISFGLEKTVTQFVSETKLPITTLNFGKSAVDESLPSFLGIYNGKLSEISLKNFVESADFILMLGVKLTDSSTGAFTHHLDENKMISLNIDEGIIFNKVVEDFDFRAVVSSLSELKGIEYEGQYIDKQYEEFIPSSAPLSQDRLWQAVESLTQSNETIVAEQGTSFFGASTIFLKSNSRFIGQPLWGSIGYTFPAALGSQIADKESRHLLFIGDGSLQLTVQELGLAIREKLNPICFIINNDGYTVEREIHGPTQSYNDIPMWNYSKLPETFGATEDRVVSKIVRTENEFVSVMKEAQADVNRMYWIELVLEKEDAPKLLKKMGKLFAEQNK

SEQ ID NO: 45 - DNA, 1641 bp, Artificial Sequence
  Variant of branched-chain keto acid decarboxylase (kdcA) from Lactococcus lactis
atgtacaccgttggcgactatctgctggaccgtctgcatgaactgggaattgaagaaatctttggcgtgccgggcgattacaatctgcaattcctggatcaaatcattgcgcgcgaagatatgaaatggattggtaacgcgaatgaactgaatgcgagctacatggctgatggctatgcacgtacgaagaaggcggcggcgttcctgacgaccttcggtgttggtgaactgagcgcaatcaatgggttggcgggcagctatgcagagaacctgccagtcgtggaaatcgttgggagtccgacctcgaaggtgcagaacgatggcaagttcgttcatcacaccctggccgacggcgacttcaagcacttcatgaagatgcacgaaccggtcaccgctgcacgtacactgctgaccgccgagaacgcgaccacagagattgaccgcgtgctgagccaactgctgaaagaacgtaaacctgtgtacatcaacctgccggttgatgtcgccgcggcgaaagccgagaaaccagctctgagcctggagaaagaaagcagcacgttaaacaccacagaacaggtgatcctgtcgaagatcgaagaaagcctgaagaacgcccagaaaccggtcgtgatcgctgggcacgaggtgattagcttcggtctggagaagacggttacgcagtttgtgagtgaaaccaaactgccgattactaccctgaactttggcaaatcggctgtggatgaatccctgccgtccttcctgggtatctacaatggtaaactgagcgagattagcctcaagaactttgtggaaagcgcagacttcatcctgatgcttggtgtgaaactgacggatatcagtacgggcgcgtttacgcaccatctggacgagaacaagatgattagcctgaacattgatgaaggcatcatcttcaacaaagtcgtagaagacttcgatttccgtgcggttgttagcagcctgagcgagctgaaaggcattgaatacgaaggtcaatacattgataagcagtacgaagagttcattccgagcagcgcaccactgagccaagaccgtctgtggcaagcagtagaatctctgacacagtccaatgaaaccattgtggcggaacagggcacgtcgttcttcggtgcctccaccatcttcctgaagagcaattcacgcttcatcggtcagccgctttggggcagcatcggctatacgtttccggcagcactgggatcacagattgcggataaggaaagtcgccatctgctgttcattggtgatggtagcctgcaactgaccgtgcaggagctgggcctggcgatccgtgagaaactgaacccgatttgtttcatcatcaacaacgatggctataccgtagagcgcgagattcatgggcctacacagagctacaatgacatcccgatgtggaactatagcaaactgccggaaacctttggcgcgacggaagatcgcgtagttagcaagatcgttcgcacagagaacgagtttgtgagtgtcatgaaagaagcgcaggccgatgttaaccgcatgtattggattgaactggttctggagaaagaagatgcaccgaaactgctgaagaagatggggaagctgtttgcagaacagaacaaa

SEQ ID NO: 46 - protein, 547 aa, Artificial Sequence
  Variant of branched-chain keto acid decarboxylase (kdcA) from Lactococcus lactis
MYTVGDYLLDRLHELGIEEIFGVPGDYNLQFLDQIIAREDMKWIGNANELNASYMADGYARTKKAAAFLTTFGVGELSAINGLAGSYAENLPVVEIVGSPTSKVQNDGKFVHHTLADGDFKHFMKMHEPVTAARTLLTAENATTEIDRVLSQLLKERKPVYINLPVDVAAAKAEKPALSLEKESSTLNTTEQVILSKIEESLKNAQKPVVIAGHEVISFGLEKTVTQFVSETKLPITTLNFGKSAVDESLPSFLGIYNGKLSEISLKNFVESADFILMLGVKLTDISTGAFTHHLDENKMISLNIDEGIIFNKVVEDFDFRAVVSSLSELKGIEYEGQYIDKQYEEFIPSSAPLSQDRLWQAVESLTQSNETIVAEQGTSFFGASTIFLKSNSRFIGQPLWGSIGYTFPAALGSQIADKESRHLLFIGDGSLQLTVQELGLAIREKLNPICFIINNDGYTVEREIHGPTQSYNDIPMWNYSKLPETFGATEDRVVSKIVRTENEFVSVMKEAQADVNRMYWIELVLEKEDAPKLLKKMGKLFAEQNK

SEQ ID NO: 47 - DNA, 1641 bp, Artificial Sequence
  Variant of branched-chain keto acid decarboxylase (kdcA) from Lactococcus lactis
atgtacaccgttggcgactatctgctggaccgtctgcatgaactgggaattgaagaaatctttggcgtgccgggcgattacaatctgcaattcctggatcaaatcattgcgcgcgaagatatgaaatggattggtaacgcgaatgaactgaatgcgagctacatggctgatggctatgcacgtacgaagaaggcggcggcgttcctgacgaccttcggtgttggtgaactgagcgcaatcaatgggttggcgggcagctatgcagagaacctgccagtcgtggaaatcgttgggagtccgacctcgaaggtgcagaaccgcggcaagttcgttcatcacaccctggccgacggcgacttcaagcacttctggaagatgcacgaaccggtcaccgctgcacgtacactgctgaccgccgagaacgcgaccacagagattgaccgcgtgctgagccaactgctgaaagaacgtaaacctgtgtacatcaacctgccggttgatgtcgccgcggcgaaagccgagaaaccagctctgagcctggagaaagaaagcagcacgttaaacaccacagaacaggtgatcctgtcgaagatcgaagaaagcctgaagaacgcccagaaaccggtcgtgatcgctgggcacgaggtgattagcttcggtctggagaagacggttacgcagtttgtgagtgaaaccaaactgccgattactaccctgaactttggcaaatcggctgtggatgaatccctgccgtccttcctgggtatctacaatggtaaacttagcgagattagcctcaagaactttgtggaaagcgcagacttcatcctgatgcttggtgtgaaactgacggatatcagtacgggcgcgtttacgcaccatctggacgagaacaagatgattagcctgaacattgatgaaggcatcatcttcaacaaagtcgtagaagacttcgatttccgtgcggttgtttctagcctgagcgagctgaagggcattgaatacgaaggtcaatacattgataagcagtacgaagagttcgacccgagcagcgcaccactgtcgcaagaccgtctgtggcaagcagtagaatctctgacacagtccaatgaaaccattgtggcggaacagggcacgtcgttcttcggtgcctccaccatcccactgaagagcaattcacgcttcatcggtcagccgctttggggcagcatcggctatacgtttccggcagcactgggatcacagattgcggataaggaaagtcgccatctgctgttcattggtgatggtagcctgcaactgaccgtgcaggagctgggcctggcgatccgtgagaaactgaacccgatttgtttcatcatcaacaacgatggctataccgtagagcgcgagattcatgggcctacacagccgtacaatgacatcccgatgtggaactatagcaaactgccggaaacctttggcgcgacggaagatcgcgtagttagcaagatcgttcgcacagagaacgagtttgtgagtgtcatgaaagaagcgcaggccgatgttaaccgcatgtattggattgaactggttctggagaaagaagatgcaccgaaactgctgaagaagatggggaagctgtttgcagaacagaacaaa

SEQ ID NO: 48 - protein, 547 aa, Artificial Sequence
  Variant of branched-chain keto acid decarboxylase (kdcA) from Lactococcus lactis
MYTVGDYLLDRLHELGIEEIFGVPGDYNLQFLDQIIAREDMKWIGNANELNASYMADGYARTKKAAAFLTTFGVGELSAINGLAGSYAENLPVVEIVGSPTSKVQNRGKFVHHTLADGDFKHFWKMHEPVTAARTLLTAENATTEIDRVLSQLLKERKPVYINLPVDVAAAKAEKPALSLEKESSTLNTTEQVILSKIEESLKNAQKPVVIAGHEVISFGLEKTVTQFVSETKLPITTLNFGKSAVDESLPSFLGIYNGKLSEISLKNFVESADFILMLGVKLTDISTGAFTHHLDENKMISLNIDEGIIFNKVVEDFDFRAVVSSLSELKGIEYEGQYIDKQYEEFDPSSAPLSQDRLWQAVESLTQSNETIVAEQGTSFFGASTIPLKSNSRFIGQPLWGSIGYTFPAALGSQIADKESRHLLFIGDGSLQLTVQELGLAIREKLNPICFIINNDGYTVEREIHGPTQPYNDIPMWNYSKLPETFGATEDRVVSKIVRTENEFVSVMKEAQADVNRMYWIELVLEKEDAPKLLKKMGKLFAEQNK

SEQ ID NO: 49 - DNA, 1641 bp, Artificial Sequence
  Variant of branched-chain keto acid decarboxylase (kdcA) from Lactococcus lactis
atgtacaccgttggcgactatctgctggaccgtctgcatgaactgggaattgaagaaatctttggcgtgccgggcgattacaatctgcaattcctggatcaaatcattgcgcgcgaagatatgaaatggattggtaacgcgaatgaactgaatgcgagctacatggctgatggctatgcacgtacgaagaaggcggcggcgttcctgacgaccttcggtgttggtgaactgagcgcaatcaatgggttggcgggcagctatgcagagaacctgccagtcgtggaaatcgttgggagtccgacctcgaaggtgcagaaccgcggcaagttcgttcatcacaccctggccgacggcgacttcaagcacttcatgaagatgcacgaaccggtcaccgctgcacgtacactgctgaccgccgagaacgcgaccacagagattgaccgcgtgctgagccaactgctgaaagaacgtaaacctgtgtacatcaacctgccggttgatgtcgccgcggcgaaagccgagaaaccagctctgagcctggagaaagaaagcagcacgttaaacaccacagaacaggtgatcctgtcgaagatcgaagaaagcctgaagaacgcccagaaaccggtcgtgatcgctgggcacgaggtgattagcttcggtctggagaagacggttacgcagtttgtgagtgaaaccaaactgccgattactaccctgaactttggcaaatcggctgtggatgaatccctgccgtccttcctgggtatctacaatggtagcctgagcgagattagcctcaagaactttgtggaaagcgcagacttcatcctgatgcttggtgtgaaactgacggatatcagtacgggcgcgtttacgcaccatctggacgagaacaagatgattagcctgaacattgatgaaggcatcatcttcaacaaagtcgtagaagacttcgatttccgtgcggttgtttctagcctgaacgagctgaagggcattgaatacgaaggtcaatacattgataagcagtacgaagagttcattccgagcagcgcaccactgtcgcaagaccgtctgtggcaagcagtagaatctctgacacagtccaatgaaaccattgtggcggaacagggcacgtcgttcttcggtgcctccaccatcttcctgaagagcaattcacgcttcatcggtcagccgctttggggcagcatcggctatacgtttccggcagcactgggatcacagattgcggataaggaaagtcgccatctgctgttcattggtgatggtagcctgcaactgaccgtgcaggagctgggcctggcgatccgtgagaaactgaacccgatttgtttcatcatcaacaacgatggctataccgtagagcgcgagattcatgggcctacacagccgtacaatgacatcccgatgtggaactatagcaaactgccggaaacctttggcgcgacggaagatcgcgtagttagcaagatcgttcgcacagagaacgagtttgtgagtgtcatgaaagaagcgcaggccgatgttaaccgcatgtattggattgaactggttctggagaaagaagatgcaccgaaactgctgaagaagatggggaagctgtttgcagaacagaacaaa

SEQ ID NO: 50 - protein, 547 aa, Artificial Sequence
  Variant of branched-chain keto acid decarboxylase (kdcA) from Lactococcus lactis
MYTVGDYLLDRLHELGIEEIFGVPGDYNLQFLDQIIAREDMKWIGNANELNASYMADGYARTKKAAAFLTTFGVGELSAINGLAGSYAENLPVVEIVGSPTSKVQNRGKFVHHTLADGDFKHFMKMHEPVTAARTLLTAENATTEIDRVLSQLLKERKPVYINLPVDVAAAKAEKPALSLEKESSTLNTTEQVILSKIEESLKNAQKPVVIAGHEVISFGLEKTVTQFVSETKLPITTLNFGKSAVDESLPSFLGIYNGSLSEISLKNFVESADFILMLGVKLTDISTGAFTHHLDENKMISLNIDEGIIFNKVVEDFDFRAVVSSLNELKGIEYEGQYIDKQYEEFIPSSAPLSQDRLWQAVESLTQSNETIVAEQGTSFFGASTIFLKSNSRFIGQPLWGSIGYTFPAALGSQIADKESRHLLFIGDGSLQLTVQELGLAIREKLNPICFIINNDGYTVEREIHGPTQPYNDIPMWNYSKLPETFGATEDRVVSKIVRTENEFVSVMKEAQADVNRMYWIELVLEKEDAPKLLKKMGKLFAEQNK

SEQ ID NO: 51 - DNA, 1641 bp, Artificial Sequence
  Variant of branched-chain keto acid decarboxylase (kdcA) from Lactococcus lactis
atgtacaccgttggcgactatctgctggaccgtctgcatgaactgggaattgaagaaatctttggcgtgccgggcgattacaatctgcaattcctggatcaaatcattgcgcgcgaagatatgaaatggattggtaacgcgaatgaactgaatgcgagctacatggctgatggctatgcacgtacgaagaaggcggcggcgttcctgacgaccttcggtgttggtgaactgagcgcaatcaatgggttggcgggcagctatgcagagaacctgccagtcgtggaaatcgttgggagtccgacctcgaaggtgcagaaccgaggcaagttcgttcatcacaccctggccgacggcgacttcaagcacttcatgaagatgcacgaaccggtcaccgctgcacgtacactgctgaccgccgagaacgcgaccacagagattgaccgcgtgctgagccaactgctgaaagaacgtaaacctgtgtacatcaacctgccggttgatgtcgccgcggcgaaagccgagaaaccagctctgagcctggagaaagaaagctcgacgttaaacaccacagaacaggtgatcctgtcgaagatcgaagaaagcctgaagaacgcccagaaaccggtcgtgatcgctgggcacgaggtgattagcttcggtctggagaagacggttacgcagtttgtgagtgaaaccaagctgccgattactaccctgaactttggcaaatcggctgtggatgaatccctgccgtccttcctgggtatctacaatggtaagctgagcgagattagcctcaagaactttgtggaaagcgcagacttcatcctgatgcttggtgtgaaactgacggatatcagtacgggcgcgtttacgcaccatctggacgagaacaagatgattagcctgaacattgatgaaggcatcatcttcaacaaagtcgtagaagacttcgatttccgtgcggttgttagcagcctgaacgagctgctaggcattgaatacgaaggtcaatacattgataagcagtacgaagagttcattccgagcagcgcaccactgagccaagaccgtctgtggcaagcagtagaatctctgacacagtccaatgaaaccattgtggcggaacagggcacgtcgttcttcggtgcctccaccatccctctgaagagcaattcacgcttcatcggtcagccgctttggggcagcatcggctatacgtttccggcagcactgggatcacagattgcggataaggaaagtcgccatctgctgttcattggtgatggtagcctgcaactgaccgtgcaggagctgggcctggcgatccgtgagaaactgaacccgatttgtttcatcatcaacaacgatggctataccgtagagcgcgagattcatgggcctacacagccgtacaatgacatcccgatgtggaactatagcaaactgccggaaacctttggcgcgacggaagatcgcgtagttagcaagatcgttcgcacagagaacgagtttgtgagtgtcatgaaagaagcgcaggccgatgttaaccgcatgtattggattgaactggttctggagaaagaagatgcaccgaaactgctgaagaagatggggaagctgtttgcagaacagaacaaa

SEQ ID NO: 52 - protein, 547 aa, Artificial Sequence
  Variant of branched-chain keto acid decarboxylase (kdcA) from Lactococcus lactis
MYTVGDYLLDRLHELGIEEIFGVPGDYNLQFLDQIIAREDMKWIGNANELNASYMADGYARTKKAAAFLTTFGVGELSAINGLAGSYAENLPVVEIVGSPTSKVQNRGKFVHHTLADGDFKHFMKMHEPVTAARTLLTAENATTEIDRVLSQLLKERKPVYINLPVDVAAAKAEKPALSLEKESSTLNTTEQVILSKIEESLKNAQKPVVIAGHEVISFGLEKTVTQFVSETKLPITTLNFGKSAVDESLPSFLGIYNGKLSEISLKNFVESADFILMLGVKLTDISTGAFTHHLDENKMISLNIDEGIIFNKVVEDFDFRAVVSSLNELLGIEYEGQYIDKQYEEFIPSSAPLSQDRLWQAVESLTQSNETIVAEQGTSFFGASTIPLKSNSRFIGQPLWGSIGYTFPAALGSQIADKESRHLLFIGDGSLQLTVQELGLAIREKLNPICFIINNDGYTVEREIHGPTQPYNDIPMWNYSKLPETFGATEDRVVSKIVRTENEFVSVMKEAQADVNRMYWIELVLEKEDAPKLLKKMGKLFAEQNK

SEQ ID NO: 53 - DNA, 1641 bp, Artificial Sequence
  Variant of branched-chain keto acid decarboxylase (kdcA) from Lactococcus lactis
atgtacaccgttggcgactatctgctggaccgtctgcatgaactgggaattgaagaaatctttggcgtgccgggcgattacaatctgcaattcctggatcaaatcattgcgcgcgaagatatgaaatggattggtaacgcgaatgaactgaatgcgagctacatggctgatggctatgcacgtacgaagaaggcggcggcgttcctgacgaccttcggtgttggtgaactgagcgcaatcaatgggttggcgggcagctatgcagagaacctgccagtcgtggaaatcgttgggagtccgacctcgaaggtgcagaaccgcggcaagttcgttcatcacaccctggccgacggcgacttcaagcacttctggaagatgcacgaaccggtcaccgctgcacgtacactgctgaccgccgagaacgcgaccacagagattgaccgcgtgctgagccaactgctgaaagaacgtaaacctgtgtacatcaacctgccggttgatgtcgccgcggcgaaagccgagaaaccagctctgagcctggagaaagaaagcagcacgttaaacaccacagaacaggtgatcctgtcgaagatcgaagaaagcctgaagaacgcccagaaaccggtcgtgatcgctgggcacgaggtgattagcttcggtctggagaagacggttacgcagtttgtgagtgaaacccacctgccgattactaccctgaactttggcaaatcggctgtggatgaatccctgccgtccttcctgggtatctacaatggtagcctgagcgagattagcctcaagaactttgtggaaagcgcagacttcatcctgatgcttggtgtgaaactgacggatatcagtacgggcgcgtttacgcaccatctggacgagaacaagatgattagcctgaacattgatgaaggcatcatcttcaacaaagtcgtagaagacttcgatttccgtgcggttgtttttagcctgaacgagctgcttggcattgaatacgaaggtcaatacattgataagcagtacgaagagttcattccgagcagcgcaccactgttgcaagaccgtctgtggcaagcagtagaatctctgacacagtccaatgaaaccattgtggcggaacagggcacgtcgttcttcggtgcctccaccatcccactgaagagcaattcacgcttcatcggtcagccgctttggggcagcatcggctatacgtttccggcagcactgggatcacagattgcggataaggaaagtcgccatctgctgttcattggtgatggtagcctgcaactgaccgtgcaggagctgggcctggcgatccgtgagaaactgaacccgatttgtttcatcatcaacaacgatggctataccgtagagcgcgagattcatgggcctacacagccgtacaatgacatcccgatgtggaactatagcaaactgccggaaacctttggcgcgacggaagatcgcgtagttagcaagatcgttcgcacagagaacgagtttgtgagtgtcatgaaagaagcgcaggccgatgttaaccgcatgtattggattgaactggttctggagaaagaagatgcaccgaaactgctgaagaagatggggaagctgtttgcagaacagaacaaa

SEQ ID NO: 54 - protein, 547 aa, Artificial Sequence
  Variant of branched-chain keto acid decarboxylase (kdcA) from Lactococcus lactis
MYTVGDYLLDRLHELGIEEIFGVPGDYNLQFLDQIIAREDMKWIGNANELNASYMADGYARTKKAAAFLTTFGVGELSAINGLAGSYAENLPVVEIVGSPTSKVQNRGKFVHHTLADGDFKHFWKMHEPVTAARTLLTAENATTEIDRVLSQLLKERKPVYINLPVDVAAAKAEKPALSLEKESSTLNTTEQVILSKIEESLKNAQKPVVIAGHEVISFGLEKTVTQFVSETHLPITTLNFGKSAVDESLPSFLGIYNGSLSEISLKNFVESADFILMLGVKLTDISTGAFTHHLDENKMISLNIDEGIIFNKVVEDFDFRAVVFSLNELLGIEYEGQYIDKQYEEFIPSSAPLLQDRLWQAVESLTQSNETIVAEQGTSFFGASTIPLKSNSRFIGQPLWGSIGYTFPAALGSQIADKESRHLLFIGDGSLQLTVQELGLAIREKLNPICFIINNDGYTVEREIHGPTQPYNDIPMWNYSKLPETFGATEDRVVSKIVRTENEFVSVMKEAQADVNRMYWIELVLEKEDAPKLLKKMGKLFAEQNK

SEQ ID NO: 55 - DNA, 1641 bp, Artificial Sequence
  Variant of branched-chain keto acid decarboxylase (kdcA) from Lactococcus lactis
atgtacaccgttggcgactatctgctggaccgtctgcatgaactgggaattgaagaaatctttggcgtgccgggcgattacaatctgcaattcctggatcaaatcattgcgcgcgaagatatgaaatggattggtaacgcgaatgaactgaatgcgagctacatggctgatggctatgcacgtacgaagaaggcggcggcgttcctgacgaccttcggtgttggtgaactgagcgcaatcaatgggttggcgggcagctatgcagagaacctgccagtcgtggaaatcgttgggagtccgacctcgaaggtgcagaaccgcggcaagttcgttcatcacaccctggccgacggcgacttcaagcacttctggaagatgcacgaaccggtcaccgctgcacgtacactgctgaccgccgagaacgcgaccacagagattgaccgcgtgctgagccaactgctgaaagaacgtaaacctgtgtacatcaacctgccggttgatgtcgccgcggcgaaagccgagaaaccagctctgagcctggagaaagaaagcagcacgttaaacaccacagaacaggtgatcctgtcgaagatcgaagaaagcctgaagaacgcccagaaaccggtcgtgatcgctgggcacgaggtgattagcttcggtctggagaagacggttacgcagtttgtgagtgaaaccaaactgccgattactaccctgaactttggcaaatcggctgtggatgaatccctgccgtccttcctgggtatctacaatggtaaactgagcgagattagcctcaagaactttgtggaaagcgcagacttcatcctgatgcttggtgtgaaactgacggatatcagtacgggcgcgtttacgcaccatctggacgagaacaagatgattagcctgaacattgatgaaggcatcatcttcaacaaagtcgtagaagacttcgatttccgtgcggttgttagcagcctgagcgagctgaaaggcattgaatacgaaggtcaatacattgataagcagtacgaagagttcattccgagcagcgcaccactgtcgcaagaccgtctgtggcaagcagtagaatctctgacacagtccaatgaaaccattgtggcggaacagggcacgtcgttcttcggtgcctccaccatcttcctgaagagcaattcacgcttcatcggtcagccgctttggggcagcatcggctatacgtttccggcagcactgggatcacagattgcggataaggaaagtcgccatctgctgttcattggtgatggtagcctgcaactgaccgtgcaggagctgggcctggcgatccgtgagaaactgaacccgatttgtttcatcatcaacaacgatggctataccgtagagcgcgagattcatgggcctacacagccgtacaatgacatcccgatgtggaactatagcaaactgccggaaacctttggcgcgacggaagatcgcgtagttagcaagatcgttcgcacagagaacgagtttgtgagtgtcatgaaagaagcgcaggccgatgttaaccgcatgtattggattgaactggttctggagaaagaagatgcaccgaaactgctgaagaagatggggaagctgtttgcagaacagaacaaa

SEQ ID NO: 56 - protein, 547 aa, Artificial Sequence
  Variant of branched-chain keto acid decarboxylase (kdcA) from Lactococcus lactis
MYTVGDYLLDRLHELGIEEIFGVPGDYNLQFLDQIIAREDMKWIGNANELNASYMADGYARTKKAAAFLTTFGVGELSAINGLAGSYAENLPVVEIVGSPTSKVQNRGKFVHHTLADGDFKHFWKMHEPVTAARTLLTAENATTEIDRVLSQLLKERKPVYINLPVDVAAAKAEKPALSLEKESSTLNTTEQVILSKIEESLKNAQKPVVIAGHEVISFGLEKTVTQFVSETKLPITTLNFGKSAVDESLPSFLGIYNGKLSEISLKNFVESADFILMLGVKLTDISTGAFTHHLDENKMISLNIDEGIIFNKVVEDFDFRAVVSSLSELKGIEYEGQYIDKQYEEFIPSSAPLSQDRLWQAVESLTQSNETIVAEQGTSFFGASTIFLKSNSRFIGQPLWGSIGYTFPAALGSQIADKESRHLLFIGDGSLQLTVQELGLAIREKLNPICFIINNDGYTVEREIHGPTQPYNDIPMWNYSKLPETFGATEDRVVSKIVRTENEFVSVMKEAQADVNRMYWIELVLEKEDAPKLLKKMGKLFAEQNK

SEQ ID NO: 57 - DNA, 1641 bp, Artificial Sequence
  Variant of branched-chain keto acid decarboxylase (kdcA) from Lactococcus lactis
atgtacaccgttggcgactatctgctggaccgtctgcatgaactgggaattgaagaaatctttggcgtgccgggcgattacaatctgcaattcctggatcaaatcattgcgcgcgaagatatgaaatggattggtaacgcgaatgaactgaatgcgagctacatggctgatggctatgcacgtacgaagaaggcggcggcgttcctgacgaccttcggtgttggtgaactgagcgcaatcaatgggttggcgggcagctatgcagagaacctgccagtcgtggaaatcgttgggagtccgacctcgaaggtgcagaaccgaggcaagttcgttcatcacaccctggccgacggcgacttcaagcacttcatgaagatgcacgaaccggtcaccgctgcacgtacactgctgaccgccgagaacgcgaccacagagattgaccgcgtgctgagccaactgctgaaagaacgtaaacctgtgtacatcaacctgccggttgatgtcgccgcggcgaaagccgagaaaccagctctgagcctggagaaatacagcccgacgttaaacaccacagaacaggtgatcctgtcgaagatcgaagaaagcctgaagaacgcccagaaaccggtcgtgatcgctgggcacgaggtgattagcttcggtctggagaagacggttacgcagtttgtgagtgaaaccaggctgccgattactaccctgaactttggcaaatcggctgtggatgaatccctgccgtccttcctgggtatctacaatggtaagctgagcgagattagcctcaagaactttgtggaaagcgcagacttcatcctgatgcttggtgtgaaactgacggatatcagtacgggcgcgtttacgcaccatctggacgagaacaagatgattagcctgaacattgatgaaggcatcatcttcaacaaagtcgtagaagacttcgatttccgtgcggttgttagcagcctgaacgagctgctaggcattgaatacgaaggtcaatacattgataagcagtacgaagagttcattccgagcgtcgcaccactgagccaagaccgtctgtggcaagcagtagaatctctgacacagtccaatgaaaccattgtggcggaacagggcacgtcgttcttcggtgcctccaccatccctctgaagagcaattcacgcttcatcggtcagccgctttggggcagcatcggctatacgtttccggcagcactgggatcacagattgcggatgacgaaagtcgccatctgctgttcattggtgatggtagcctgcaactgaccgtgcaggagctgggcctggcgatccgtgagaaactgaacccgatttgtttcatcatcaacaacgatggctataccgtagagcgcgagattcatgggcctacacagccgtacaatgacatcccgatgtggaactatagcaaactgccggaaacctttggcgcgacggaagatcgcgtagttagcaagatcgttcgcacagagaacgagtttgtgagtgtcatgaaagaagcgcaggccgatgttaaccgcatgtattggattgaactggttctggagaaagaagatgcaccgaaactgctgaagaagatggggaagctgtttgcagaacagaacaaa

SEQ ID NO: 58 - protein, 547 aa, Artificial Sequence
  Variant of branched-chain keto acid decarboxylase (kdcA) from Lactococcus lactis
MYTVGDYLLDRLHELGIEEIFGVPGDYNLQFLDQIIAREDMKWIGNANELNASYMADGYARTKKAAAFLTTFGVGELSAINGLAGSYAENLPVVEIVGSPTSKVQNRGKFVHHTLADGDFKHFMKMHEPVTAARTLLTAENATTEIDRVLSQLLKERKPVYINLPVDVAAAKAEKPALSLEKYSPTLNTTEQVILSKIEESLKNAQKPVVIAGHEVISFGLEKTVTQFVSETRLPITTLNFGKSAVDESLPSFLGIYNGKLSEISLKNFVESADFILMLGVKLTDISTGAFTHHLDENKMISLNIDEGIIFNKVVEDFDFRAVVSSLNELLGIEYEGQYIDKQYEEFIPSVAPLSQDRLWQAVESLTQSNETIVAEQGTSFFGASTIPLKSNSRFIGQPLWGSIGYTFPAALGSQIADDESRHLLFIGDGSLQLTVQELGLAIREKLNPICFIINNDGYTVEREIHGPTQPYNDIPMWNYSKLPETFGATEDRVVSKIVRTENEFVSVMKEAQADVNRMYWIELVLEKEDAPKLLKKMGKLFAEQNK

SEQ ID NO: 59 - DNA, 1641 bp, Artificial Sequence
  Variant of branched-chain keto acid decarboxylase (kdcA) from Lactococcus lactis
atgtacaccgttggcgactatctgctggaccgtctgcatgaactgggaattgaagaaatctttggcgtgccgggcgattacaatctgcaattcctggatcaaatcattgcgcgcgaagatatgaaatggattggtaacgcgaatgaactgaatgcgagctacatggctgatggctatgcacgtacgaagaaggcggcggcgttcctgacgaccttcggtgttggtgaactgagcgcaatcaatgggttggcgggcagctatgcagagaacctgccagtcgtggaaatcgttgggagtccgacctcgaaggtgcagaaccgcggcaagttcgttcatcacaccctggccgacggcgacttcaagcacttcatgaagatgcacgaaccggtcaccgctgcacgtacactgctgaccgccgagaacgcgaccacagagattgaccgcgtgctgagccaactgctgaaagaacgtaaacctgtgtacatcaacctgccggttgatgtcgccgcggcgaaagccgagaaaccagctctgagcctggagaaagaaagcagcacgttaaacaccacagaacaggtgatcctgtcgaagatcgaagaaagcctgaagaacgcccagaaaccggtcgtgatcgctgggcacgaggtgattagcttcggtctggagaagacggttacgcagtttgtgagtgaaaccaaactgccgattactaccctgaactttggcaaatcggctgtggatgaatccctgccgtccttcctgggtatctacaatggtaaactgagcgagattagcctcaagaactttgtggaaagcgcagacttcatcctgatgcttggtgtgaaactgacggatatcagtacgggcgcgtttacgcaccatctggacgagaacaagatgattagcctgaacattgatgaaggcatcatcttcaacaaagtcgtagaagacttcgatttccgtgcggttgttagcagcctgagcgagctgaaaggcattgaatacgaaggtcaatacattgataagcagtacgaagagttcattccgagcagcgcaccactgttgcaagaccgtctgtggcaagcagtagaatctctgacacagtccaatgaaaccattgtggcggaacagggcacgtcgttcttcggtgcctccaccatcttcctgaagagcaattcacgcttcatcggtcagccgctttggggcagcatcggctatacgtttccggcagcactgggatcacagattgcggataaggaaagtcgccatctgctgttcattggtgatggtagcctgcaactgaccgtgcaggagctgggcctggcgatccgtgagaaactgaacccgatttgtttcatcatcaacaacgatggctataccgtagagcgcgagattcatgggcctacacagccgtacaatgacatcccgatgtggaactatagcaaactgccggaaacctttggcgcgacggaagatcgcgtagttagcaagatcgttcgcacagagaacgagtttgtgagtgtcatgaaagaagcgcaggccgatgttaaccgcatgtattggattgaactggttctggagaaagaagatgcaccgaaactgctgaagaagatggggaagctgtttgcagaacagaacaaa

SEQ ID NO: 60 - protein, 547 aa, Artificial Sequence
  Variant of branched-chain keto acid decarboxylase (kdcA) from Lactococcus lactis
MYTVGDYLLDRLHELGIEEIFGVPGDYNLQFLDQIIAREDMKWIGNANELNASYMADGYARTKKAAAFLTTFGVGELSAINGLAGSYAENLPVVEIVGSPTSKVQNRGKFVHHTLADGDFKHFMKMHEPVTAARTLLTAENATTEIDRVLSQLLKERKPVYINLPVDVAAAKAEKPALSLEKESSTLNTTEQVILSKIEESLKNAQKPVVIAGHEVISFGLEKTVTQFVSETKLPITTLNFGKSAVDESLPSFLGIYNGKLSEISLKNFVESADFILMLGVKLTDISTGAFTHHLDENKMISLNIDEGIIFNKVVEDFDFRAVVSSLSELKGIEYEGQYIDKQYEEFIPSSAPLLQDRLWQAVESLTQSNETIVAEQGTSFFGASTIFLKSNSRFIGQPLWGSIGYTFPAALGSQIADKESRHLLFIGDGSLQLTVQELGLAIREKLNPICFIINNDGYTVEREIHGPTQPYNDIPMWNYSKLPETFGATEDRVVSKIVRTENEFVSVMKEAQADVNRMYWIELVLEKEDAPKLLKKMGKLFAEQNK

SEQ ID NO: 61 - DNA, 1641 bp, Artificial Sequence
  Variant of branched-chain keto acid decarboxylase (kdcA) from Lactococcus lactis
atgtacaccgttggcgactatctgctggaccgtctgcatgaactgggaattgaagaaatctttggcgtgccgggcgattacaatctgcaattcctggatcaaatcattgcgcgcgaagatatgaaatggattggtaacgcgaatgaactgaatgcgagctacatggctgatggctatgcacgtacgaagaaggcggcggcgttcctgacgaccttcggtgttggtgaactgagcgcaatcaatgggttggcgggcagctatgcagagaacctgccagtcgtggaaatcgttgggagtccgacctcgaaggtgcagaaccgaggcaagttcgttcatcacaccctggccgacggcgacttcaagcacttcatgaagatgcacgaaccggtcaccgctgcacgtacactgctgaccgccgagaacgcgaccacagagattgaccgcgtgctgagccaactgctgaaagaacgtaaacctgtgtacatcaacctgccggttgatgtcgccgcggcgaaagccgagaaaccagctctgagcctggagaaagaaagctcgacgttaaacaccacagaacaggtgatcctgtcgaagatcgaagaaagcctgaagaacgcccagaaaccggtcgtgatcgctgggcacgaggtgattagcttcggtctggagaagacggttacgcagtttgtgagtgaaaccaaactgccgattactaccctgaactttggcaaatcggctgtggatgaatccctgccgtccttcctgggtatctacaatggtaaactgagcgagattagcctcaagaactttgtggaaagcgcagacttcatcctgatgcttggtgtgaaactgacggatatcagtacgggcgcgtttacgcaccatctggacgagaacaagatgattagcctgaacattgatgaaggcatcatcttcaacaaagtcgtagaagacttcgatttccgtgcggttgttagcagcctgagcgagctgaaaggcattgaatacgaaggtcaatacattgataagcagtacgaagagttcattccgagcagcgcaccactgagccaagaccgtctgtggcaagcagtagaatctctgacacagtccaatgaaaccattgtggcggaacagggcacgtcgttcttcggtgcctccaccatccctctgaagagcaattcacgcttcatcggtcagccgctttggggcagcatcggctatacgtttccggcagcactgggatcacagattgcggataaggaaagtcgccatctgctgttcattggtgatggtagcctgcaactgaccgtgcaggagctgggcctggcgatccgtgagaaactgaacccgatttgtttcatcatcaacaacgatggctataccgtagagcgcgagattcatgggcctacacagccgtacaatgacatcccgatgtggaactatagcaaactgccggaaacctttggcgcgacggaagatcgcgtagttagcaagatcgttcgcacagagaacgagtttgtgagtgtcatgaaagaagcgcaggccgatgttaaccgcatgtattggattgaactggttctggagaaagaagatgcaccgaaactgctgaagaagatggggaagctgtttgcagaacagaacaaa

SEQ ID NO: 62 - protein, 547 aa, Artificial Sequence
  Variant of branched-chain keto acid decarboxylase (kdcA) from Lactococcus lactis
MYTVGDYLLDRLHELGIEEIFGVPGDYNLQFLDQIIAREDMKWIGNANELNASYMADGYARTKKAAAFLTTFGVGELSAINGLAGSYAENLPVVEIVGSPTSKVQNRGKFVHHTLADGDFKHFMKMHEPVTAARTLLTAENATTEIDRVLSQLLKERKPVYINLPVDVAAAKAEKPALSLEKESSTLNTTEQVILSKIEESLKNAQKPVVIAGHEVISFGLEKTVTQFVSETKLPITTLNFGKSAVDESLPSFLGIYNGKLSEISLKNFVESADFILMLGVKLTDISTGAFTHHLDENKMISLNIDEGIIFNKVVEDFDFRAVVSSLSELKGIEYEGQYIDKQYEEFIPSSAPLSQDRLWQAVESLTQSNETIVAEQGTSFFGASTIPLKSNSRFIGQPLWGSIGYTFPAALGSQIADKESRHLLFIGDGSLQLTVQELGLAIREKLNPICFIINNDGYTVEREIHGPTQPYNDIPMWNYSKLPETFGATEDRVVSKIVRTENEFVSVMKEAQADVNRMYWIELVLEKEDAPKLLKKMGKLFAEQNK

SEQ ID NO: 63 - DNA, 1641 bp, Artificial Sequence
  Variant of branched-chain keto acid decarboxylase (kdcA) from Lactococcus lactis
atgtacaccgttggcgactatctgctggaccgtctgcatgaactgggaattgaagaaatctttggcgtgccgggcgattacaatctgcaattcctggatcaaatcattgcgcgcgaagatatgaaatggattggtaacgcgaatgaactgaatgcgagctacatggctgatggctatgcacgtacgaagaaggcggcggcgttcctgacgaccttcggtgttggtgaactgagcgcaatcaatgggttggcgggcagctatgcagagaacctgccagtcgtggaaatcgttgggagtccgacctcgaaggtgcagaaccgaggcaagttcgttcatcacaccctggccgacggcgacttcaagcacttcatgaagatgcacgaaccggtcaccgctgcacgtacactgctgaccgccgagaacgcgaccacagagattgaccgcgtgctgagccaactgctgaaagaacgtaaacctgtgtacatcaacctgccggttgatgtcgccgcggcgaaagccgagaaaccagctctgagcctggagaaatacagctcgacgttaaacaccacagaacaggtgatcctgtcgaagatcgaagaaagcctgaagaacgcccagaaaccggtcgtgatcgctgggcacgaggtgattagcttcggtctggagaagacggttacgcagtttgtgagtgaaacccacctgccgattactaccctgaactttggcaaatcggctgtggatgaatccctgccgtccttcctgggtatctacaatggttcactgagcgagattagcctcaagaactttgtggaaagcgcagacttcatcctgatgcttggtgtgaaactgacggatatcagtacgggcgcgtttacgcaccatctggacgagaacaagatgattagcctgaacattgatgaaggcatcatcttcaacaaagtcgtagaagacttcgatttccgtgcggttgttagcagcctgaacgagctgaaaggcattgaatacgaaggtcaatacattgataagcagtacgaagagttcgacccgagcgtcgcaccactgagccaagaccgtctgtggcaagcagtagaatctctgacacagtccaatgaaaccattgtggcggaacagggcacgtcgttcttcggtgcctccaccatcttcctgaagagcaattcacgcttcatcggtcagccgctttggggcagcatcggctatacgtttccggcagcactgggatcacagattgcggataaggaaagtcgccatctgctgttcattggtgatggtagcctgcaactgaccgtgcaggagctgggcctggcgatccgtgagaaactgaacccgatttgtttcatcatcaacaacgatggctataccgtagagcgcgagattcatgggcctacacagccgtacaatgacatcccgatgtggaactatagcaaactgccggaaacctttggcgcgacggaagatcgcgtagttagcaagatcgttcgcacagagaacgagtttgtgagtgtcatgaaagaagcgcaggccgatgttaaccgcatgtattggattgaactggttctggagaaagaagatgcaccgaaactgctgaagaagatggggaagctgtttgcagaacagaacaaa

SEQ ID NO: 64 - protein, 547 aa, Artificial Sequence
  Variant of branched-chain keto acid decarboxylase (kdcA) from Lactococcus lactis
MYTVGDYLLDRLHELGIEEIFGVPGDYNLQFLDQIIAREDMKWIGNANELNASYMADGYARTKKAAAFLTTFGVGELSAINGLAGSYAENLPVVEIVGSPTSKVQNRGKFVHHTLADGDFKHFMKMHEPVTAARTLLTAENATTEIDRVLSQLLKERKPVYINLPVDVAAAKAEKPALSLEKYSSTLNTTEQVILSKIEESLKNAQKPVVIAGHEVISFGLEKTVTQFVSETHLPITTLNFGKSAVDESLPSFLGIYNGSLSEISLKNFVESADFILMLGVKLTDISTGAFTHHLDENKMISLNIDEGIIFNKVVEDFDFRAVVSSLNELKGIEYEGQYIDKQYEEFDPSVAPLSQDRLWQAVESLTQSNETIVAEQGTSFFGASTIFLKSNSRFIGQPLWGSIGYTFPAALGSQIADKESRHLLFIGDGSLQLTVQELGLAIREKLNPICFIINNDGYTVEREIHGPTQPYNDIPMWNYSKLPETFGATEDRVVSKIVRTENEFVSVMKEAQADVNRMYWIELVLEKEDAPKLLKKMGKLFAEQNK

SEQ ID NO: 65 - DNA, 1641 bp, Artificial Sequence
  Variant of branched-chain keto acid decarboxylase (kdcA) from Lactococcus lactis
atgtacaccgttggcgactatctgctggaccgtctgcatgaactgggaattgaagaaatctttggcgtgccgggcgattacaatctgcaattcctggatcaaatcattgcgcgcgaagatatgaaatggattggtaacgcgaatgaactgaatgcgagctacatggctgatggctatgcacgtacgaagaaggcggcggcgttcctgacgaccttcggtgttggtgaactgagcgcaatcaatgggttggcgggcagctatgcagagaacctgccagtcgtggaaatcgttgggagtccgacctcgaaggtgcagaacgatggcaagttcgttcatcacaccctggccgacggcgacttcaagcacttcatgaagatgcacgaaccggtcaccgctgcacgtacacttctgaccgccgagaacgcgaccacagagattgaccgcgtgctgagccaactgctgaaagaacgtaaacctgtgtacatcaacctgccggttgatgtcgccgcggcgaaagccgagaaaccagctctgagcctggagaaagaaagcagcacgttaaacaccacagaacaggtgatcctgtcgaagatcgaagaaagcctgaagaacgcccagaaaccggtcgtgatcgctgggcacgaggtgattagcttcggtctggagaagacggttacgcagtttgtgagtgaaaccaaactgccgattactaccctgaactttggcaaatcggctgtggatgaatccctgccgtccttcctgggtatctacaatggtaaactgagcgagattagcctcaagaactttgtggaaagcgcagacttcatcctgatgcttggtgtgaaactgacggatatcagtacgggcgcgtttacgcaccatctggacgagaacaagatgattagcctgaacattgatgaaggcatcatcttcaacaaagtcgtagaagacttcgatttccgcgcggttgttagcagcctgagcgagctgaaaggcattgaatacgaaggtgaatacattgatagacagtacgaagagttcattccgagcagcgcaccactgagccaagaccgtctgtggcaagcagtagaatctctgacacagtccaatgaaaccattgtggcggaacagggcacgtcgttcttcggtgcctccaccatcttcctgaagagcaattcacgcttcatcggtcagccgctttggggcagcatcggctatacgtttccggcagcactgggatcacagattgcggataaggaaagtcgccatctgctgttcattggtgatggtagcctgcaactgaccgtgcaagagctgggcctggcgatccgtgagaaactgaacccgatttgtttcatcatcaacaacgatggctataccgtagagcgcgagattcatgggcctacacagccgtacaatgacatcccgatgtggaactatagcaaactgccggaaacctttggcgcgacggaagatcgcgtagttagcaagatcgttcgcacagagaacgagtttgtgagtgtcatgaaagaagcgcaggccgatgttaaccgcatgtattggattgaactggttctggagaaagaagatgcaccgaaactgctgaagaagatggggaagctgtttgcagaacagaacaaa

SEQ ID NO: 66 - protein, 547 aa, Artificial Sequence
  Variant of branched-chain keto acid decarboxylase (kdcA) from Lactococcus lactis
MYTVGDYLLDRLHELGIEEIFGVPGDYNLQFLDQIIAREDMKWIGNANELNASYMADGYARTKKAAAFLTTFGVGELSAINGLAGSYAENLPVVEIVGSPTSKVQNDGKFVHHTLADGDFKHFMKMHEPVTAARTLLTAENATTEIDRVLSQLLKERKPVYINLPVDVAAAKAEKPALSLEKESSTLNTTEQVILSKIEESLKNAQKPVVIAGHEVISFGLEKTVTQFVSETKLPITTLNFGKSAVDESLPSFLGIYNGKLSEISLKNFVESADFILMLGVKLTDISTGAFTHHLDENKMISLNIDEGIIFNKVVEDFDFRAVVSSLSELKGIEYEGEYIDRQYEEFIPSSAPLSQDRLWQAVESLTQSNETIVAEQGTSFFGASTIFLKSNSRFIGQPLWGSIGYTFPAALGSQIADKESRHLLFIGDGSLQLTVQELGLAIREKLNPICFIINNDGYTVEREIHGPTQPYNDIPMWNYSKLPETFGATEDRVVSKIVRTENEFVSVMKEAQADVNRMYWIELVLEKEDAPKLLKKMGKLFAEQNK

SEQ ID NO: 67 - DNA, 1641 bp, Artificial Sequence
  Variant of branched-chain keto acid decarboxylase (kdcA) from Lactococcus lactis
atgtacaccgttggcgactatctgctggaccgtctgcatgaactgggaattgaagaaatctttggcgtgccgggcgattacaatctgcaattcctggatcaaatcattgcgcgcgaagatatgaaatggattggtaacgcgaatgaactgaatgcgagctacatggctgatggctatgcacgtacgaagaaggcggcggcgttcctgacgaccttcggtgttggtgaactgagcgcaatcaatgggttggcgggcagctatgcagagaacctgccagtcgtggaaatcgttgggagtccgacctcgaaggtgcagaaccgaggcaagttcgttcatcacaccctggccgacggcgacttcaagcacttcatgaagatgcacgaaccggtcaccgctgcacgtacactgctgaccgccgagaacgcgaccacagagattgaccgcgtgctgagccaactgctgaaagaacgtaaacctgtgtacatcaacctgccggttgatgtcgccgcggcgaaagccgagaaaccagctctgagcctggagaaatacagctcgacgttaaacaccacagaacaggtgatcctgtcgaagatcgaagaaagcctgaagaacgcccagaaaccggtcgtgatcgctgggcacgaggtgattagcttcggtctggagaagacggttacgcagtttgtgagtgaaacccacctgccgattactaccctgaactttggcaaatcggctgtggatgaatccctgccgtccttcctgggtatctacaatggttcactgagcgagattagcctcaagaactttgtggaaagcgcagacttcatcctgatgcttggtgtgaaactgacggatatcagtacgggcgcgtttacgcaccatctggacgagaacaagatgattagcctgaacattgatgaaggcatcatcttcaacaaagtcgtagaagacttcgatttccgtgcggttgttagcagcctgagcgagctgctaggcattgaatacgaaggtcaatacattgataagcagtacgaagagttcattccgagcagcgcaccactgagccaagaccgtctgtggcaagcagtagaatctctgacacagtccaatgaaaccattgtggcggaacagggcacgtcgttcttcggtgcctccaccatcttcctgaagagcaattcacgcttcatcggtcagccgctttggggcagcatcggctatacgtttccggcagcactgggatcacagattgcggatgacgaaagtcgccatctgctgttcattggtgatggtagcctgcaactgaccgtgcaggagctgggcctggcgatccgtgagaaactgaacccgatttgtttcatcatcaacaacgatggctataccgtagagcgcgagattcatgggcctacacagccgtacaatgacatcccgatgtggaactatagcaaactgccggaaacctttggcgcgacggaagatcgcgtagttagcaagatcgttcgcacagagaacgagtttgtgagtgtcatgaaagaagcgcaggccgatgttaaccgcatgtattggattgaactggttctggagaaagaagatgcaccgaaactgctgaagaagatggggaagctgtttgcagaacagaacaaa

SEQ ID NO: 68 - protein, 547 aa, Artificial Sequence
  Variant of branched-chain keto acid decarboxylase (kdcA) from Lactococcus lactis
MYTVGDYLLDRLHELGIEEIFGVPGDYNLQFLDQIIAREDMKWIGNANELNASYMADGYARTKKAAAFLTTFGVGELSAINGLAGSYAENLPVVEIVGSPTSKVQNRGKFVHHTLADGDFKHFMKMHEPVTAARTLLTAENATTEIDRVLSQLLKERKPVYINLPVDVAAAKAEKPALSLEKYSSTLNTTEQVILSKIEESLKNAQKPVVIAGHEVISFGLEKTVTQFVSETHLPITTLNFGKSAVDESLPSFLGIYNGSLSEISLKNFVESADFILMLGVKLTDISTGAFTHHLDENKMISLNIDEGIIFNKVVEDFDFRAVVSSLSELLGIEYEGQYIDKQYEEFIPSSAPLSQDRLWQAVESLTQSNETIVAEQGTSFFGASTIFLKSNSRFIGQPLWGSIGYTFPAALGSQIADDESRHLLFIGDGSLQLTVQELGLAIREKLNPICFIINNDGYTVEREIHGPTQPYNDIPMWNYSKLPETFGATEDRVVSKIVRTENEFVSVMKEAQADVNRMYWIELVLEKEDAPKLLKKMGKLFAEQNK

SEQ ID NO: 69 - DNA, 1641 bp, Artificial Sequence
  Variant of branched-chain keto acid decarboxylase (kdcA) from Lactococcus lactis
atgtacaccgttggcgactatctgctggaccgtctgcatgaactgggaattgaagaaatctttggcgtgccgggcgattacaatctgcaattcctggatcaaatcattgcgcgcgaagatatgagatggattggtaacgcgaatgaactgaatgcgagctacatggctgatggctatgcacgtacgaagaaggcggcggcgttcctgacgaccttcggtgttggtgaactgagcgcaatcaatgggttggcgggcagctatgcagagaacctgccagtcgtggaaatcgttgggagtccgacctcgaaggtgcagaacgatggcaagttcgttcatcacaccctggccgacggcgacttcaagcacttcatgaagatgcacgaaccggtcaccgctgcacgtacacttctgaccgccgagaacgcgaccacagagattgaccgcgtgctgagccaactgctgaaagaacgtaaacctgtgtacatcaacctgccggttgatgtcgccgcggcgaaagccgagaaaccagctctgagcctggagaaagaaagcagcacgttaaacaccacagaacaggtgatcctgtcgaagatcgaagaaagcctgaagtgggcccagaaaccggtcgtgatcgctgggcacgaggtgattagcttcggtctggagaagacggttacgcagtttgtgagtgaaaccaaactgccgattactaccctgaactttggcaaatcggctgtggatgaatccctgccgtccttcctgggtatctacaatggtaaactgagcgagattagcctcaagaactttgtggaaagcgcagacttcatcctgatgcttggtgtgaaactgacggatatcagtacgggcgcgtttacgcaccatctggacgagaacaagatgattagcctgaacattgatgaaggcatcatcttcaacaaagtcgtagaagacttcgatttccgtgcggttgttagcagcctgttggagctgaaaggcattgaatacgaaggtcaatacattgatagacagtacgaagagttcattccgagcagcgcaccactgagccaagaccgtctgtggcaagcagtagaatctctgacacagtccaatgaaaccattgtggcggaacagggcacgtcgttcttcggtgcctccaccatcttcctgaagagcaattcacgcttcatcggtcagccgctttggggcagcatcggctatacgtttccggcagcactgggatcacagattgcggataaggaaagtcgccatctgctgttcattggtgatggtagcctgcaactgaccgtgagcgagctgggcctggcgatccgtgagaaactgaacccgatttgtttcatcatcaacaacgatggctataccgtagagcgcgagattcatgggcctacacagccgtacaatgacatcccgatgtggaactatagcaaactgccggaaacctttggcgcgacggaagatcgcgtagttagcaagatcgttcgcacagagaacgagtttgtgagtgtcatgaaagaagcgcaggccgatgttaaccgcatgtattggattgaactggttctggagaaagaagatgcaccgaaactgctgaagaagatggggaagctgtttgcagaacagaacaaa

SEQ ID NO: 70 - protein, 547 aa, Artificial Sequence
  Variant of branched-chain keto acid decarboxylase (kdcA) from Lactococcus lactis
MYTVGDYLLDRLHELGIEEIFGVPGDYNLQFLDQIIAREDMRWIGNANELNASYMADGYARTKKAAAFLTTFGVGELSAINGLAGSYAENLPVVEIVGSPTSKVQNDGKFVHHTLADGDFKHFMKMHEPVTAARTLLTAENATTEIDRVLSQLLKERKPVYINLPVDVAAAKAEKPALSLEKESSTLNTTEQVILSKIEESLKWAQKPVVIAGHEVISFGLEKTVTQFVSETKLPITTLNFGKSAVDESLPSFLGIYNGKLSEISLKNFVESADFILMLGVKLTDISTGAFTHHLDENKMISLNIDEGIIFNKVVEDFDFRAVVSSLLELKGIEYEGQYIDRQYEEFIPSSAPLSQDRLWQAVESLTQSNETIVAEQGTSFFGASTIFLKSNSRFIGQPLWGSIGYTFPAALGSQIADKESRHLLFIGDGSLQLTVSELGLAIREKLNPICFIINNDGYTVEREIHGPTQPYNDIPMWNYSKLPETFGATEDRVVSKIVRTENEFVSVMKEAQADVNRMYWIELVLEKEDAPKLLKKMGKLFAEQNK

SEQ ID NO: 71 - DNA, 1641 bp, Artificial Sequence
  Variant of branched-chain keto acid decarboxylase (kdcA) from Lactococcus lactis
atgtacaccgttggcgactatctgctggaccgtctgcatgaactgggaattgaagaaatctttggcgtgccgggcgattacaatctgcaattcctggatcaaatcattgcgcgcgaagatatgaaatggattggtaacgcgaatgaactgaatgcgagctacatggctgatggctatgcacgtacgaagaaggcggcggcgttcctgacgaccttcggtgttggtgaactgagcgcaatcaatgggttggcgggcagctatgcagagaacctgccagtcgtggaaatcgttgggagtccgacctcgaaggtgcagaacgatggcaagttcgttcatcacaccctggccgacggcgacttcaagcacttcaggaagatgcacgaaccggtcaccgctgcacgtacacatctgaccgccgagaacgcgaccacagagattgaccgcgtgctgagccaactgctgaaagaacgtaaacctgtgtacatcaacctgccggttgatgtcgccgcggcgaaagccgagaaaccagctctgagcctggagaaagaaagcagcacgttaaacaccacagaacaggtgatcctgtcgaagatcgaagaaagcctgaagtgggcccagaaaccggtcgtgatcgctgggcacgaggtgattagcttcggtctggagaagacggttacgcagtttgtgagtgaaaccaaactgccgattactaccctgaactttggcaaatcggctgtggatgaatccctgccgtccttcctgggtatctacaatggtaaactgagcgagattagcctcaagaactttgtggaaagcgcagacttcatcctgatgcttggtgtgaaactgacggatatcagtacgggcgcgtttacgcaccatctggacgagaacaagatgattagcctgaacattgatgaaggcatcatcttcaacaaagtcgtagaagacttcgatttccgcgcggttgttagcagcctgagcgagctgaaaggcattgaatacgaaggtcaatacattgataagcagtacgaagagttcattccgagcagcgcaccactgatgcaagaccgtctgtggcaagcagtagaatctctgacacagtccaatgaaaccattgtggcggaacagggcacgtcgttcttcggtgcctccaccatcttcctgaagagcaattcacgcttcatcggtcagccgctttggggcagcatcggctatacgtttccggcagcactgggatcacagattgcggataaggaaagtcgccatctgctgttcattggtgatggtagcctgcaactgaccgtgagcgagctgggcctggcgatccgtgagaaactgaacccgatttgtttcatcatcaacaacgatggctataccgtagagcgcgagattcatgggcctacacagccgtacaatgacatcccgatgtggaactatagcaaactgccggaaacctttggcgcgacggaagatcgcgtagttagcaagatcgttcgcacagagaacgagtttgtgagtgtcatgaaggaagcgcaggccgatgttaaccgcatgtattggattgaactggttctggagaaagaagatgcaccgaaactgctgaagaagatggggaagctgtttgcagaacagaacaaa

SEQ ID NO: 72 - protein, 547 aa, Artificial Sequence
  Variant of branched-chain keto acid decarboxylase (kdcA) from Lactococcus lactis
MYTVGDYLLDRLHELGIEEIFGVPGDYNLQFLDQIIAREDMKWIGNANELNASYMADGYARTKKAAAFLTTFGVGELSAINGLAGSYAENLPVVEIVGSPTSKVQNDGKFVHHTLADGDFKHFRKMHEPVTAARTHLTAENATTEIDRVLSQLLKERKPVYINLPVDVAAAKAEKPALSLEKESSTLNTTEQVILSKIEESLKWAQKPVVIAGHEVISFGLEKTVTQFVSETKLPITTLNFGKSAVDESLPSFLGIYNGKLSEISLKNFVESADFILMLGVKLTDISTGAFTHHLDENKMISLNIDEGIIFNKVVEDFDFRAVVSSLSELKGIEYEGQYIDKQYEEFIPSSAPLMQDRLWQAVESLTQSNETIVAEQGTSFFGASTIFLKSNSRFIGQPLWGSIGYTFPAALGSQIADKESRHLLFIGDGSLQLTVSELGLAIREKLNPICFIINNDGYTVEREIHGPTQPYNDIPMWNYSKLPETFGATEDRVVSKIVRTENEFVSVMKEAQADVNRMYWIELVLEKEDAPKLLKKMGKLFAEQNK

SEQ ID NO: 73 - DNA, 1641 bp, Artificial Sequence
  Variant of branched-chain keto acid decarboxylase (kdcA) from Lactococcus lactis
atgtacaccgttggcgactatctgctggaccgtctgcatgaactgggaattgaagaaatctttggcgtgccgggcgattacaatctgcaattcctggatcaaatcattgcgcgcgaagatatgaaatggattggtaacgcgaatgaactgaatgcgagctacatggctgatggctatgcacgtacgaagaaggcggcggcgttcctgacgaccttcggtgttggtgaactgagcgcaatcaatgggttggcgggcagctatgcagagaacctgccagtcgtggaaatcgttgggagtccgacctcgaaggtgcagaacgatggcaagttcgttcatcacaccctggccgacggcgacttcaagcacttcatgaagatgcacgaaccggtcaccgctgcacgtacactgctgaccgccgagaacgcgaccacagagattgaccgcgtgctgagccaactgctgaaagaacgtaaacctgtgtacatcaacctgccggttgatgtcgccgcggcgaaagccgagaaaccagctctgagcctggagaaagaaagctcgacgttaaacaccacagaacaggtgatcctgtcgaagatcgaagaaagcctgaagaacgcccagaaaccggtcgtgatcgctgggcacgaggtgattagcttcggtctggagaagacggttacgcagtttgtgagtgaaaccaaactgccgattactaccctgaactttggcaaatcggctgtggatgaatccctgccgtccttcctgggtatctacaatggtaaactgagcgagattagcctcaagaactttgtggaaagcgcagacttcatcctgatgcttggtgtgaaactgacggatatcagtacgggcgcgtttacgcaccatctggacgagaacaagatgattagcctgaacattgatgaaggcatcatcttcaacaaagtcgtagaagacttcgatttccgtgcggttgttagcagcctgaacgagctgaaaggcattgaatacgaaggtcaatacattgataagcagtacgaagagttcattccgagcagcgcaccactgagccaagaccgtctgtggcaagcagtagaatctctgacacagtccaatgaaaccattgtggcggaacagggcacgtcgttcttcggtgcctccaccatcttcctgaagagcaattcacgcttcatcggtcagccgctttggggcagcatcggctatacgtttccggcagcactgggatcacagattgcggataaggaaagtcgccatctgctgttcattggtgatggtagcctgcaactgaccgtgcaggagctgggcctggcgatccgtgagaaactgaacccgatttgtttcatcatcaacaacgatggctataccgtagagcgcgagattcatgggcctacacagccgtacaatgacatcccgatgtggaactatagcaaactgccggaaacctttggcgcgacggaagatcgcgtagttagcaagatcgttcgcacagagaacgagtttgtgagtgtcatgaaagaagcgcaggccgatgttaaccgcatgtattggattgaactggttctggagaaagaagatgcaccgaaactgctgaagaagatggggaagctgtttgcagaacagaacaaa

SEQ ID NO: 74 - protein, 547 aa, Artificial Sequence
  Variant of branched-chain keto acid decarboxylase (kdcA) from Lactococcus lactis
MYTVGDYLLDRLHELGIEEIFGVPGDYNLQFLDQIIAREDMKWIGNANELNASYMADGYARTKKAAAFLTTFGVGELSAINGLAGSYAENLPVVEIVGSPTSKVQNDGKFVHHTLADGDFKHFMKMHEPVTAARTLLTAENATTEIDRVLSQLLKERKPVYINLPVDVAAAKAEKPALSLEKESSTLNTTEQVILSKIEESLKNAQKPVVIAGHEVISFGLEKTVTQFVSETKLPITTLNFGKSAVDESLPSFLGIYNGKLSEISLKNFVESADFILMLGVKLTDISTGAFTHHLDENKMISLNIDEGIIFNKVVEDFDFRAVVSSLNELKGIEYEGQYIDKQYEEFIPSSAPLSQDRLWQAVESLTQSNETIVAEQGTSFFGASTIFLKSNSRFIGQPLWGSIGYTFPAALGSQIADKESRHLLFIGDGSLQLTVQELGLAIREKLNPICFIINNDGYTVEREIHGPTQPYNDIPMWNYSKLPETFGATEDRVVSKIVRTENEFVSVMKEAQADVNRMYWIELVLEKEDAPKLLKKMGKLFAEQNK

SEQ ID NO: 75 - DNA, 1641 bp, Artificial Sequence
  Variant of branched-chain keto acid decarboxylase (kdcA) from Lactococcus lactis
atgtacaccgttggcgactatctgctggaccgtctgcatgaactgggaattgaagaaatctttggcgtgccgggcgattacaatctgcaattcctggatcaaatcattgcgcgcgaagatatgaaatggattggtaacgcgaatgaactgaatgcgagctacatggctgatggctatgcacgtacgaagaaggcggcggcgttcctgacgaccttcggtgttggtgaactgagcgcaatcaatgggttggcgggcagctatgcagagaacctgccagtcgtggaaatcgttgggagtccgacctcgaaggtgcagaaccgaggcaagttcgttcatcacaccctggccgacggcgacttcaagcacttcatgaagatgcacgaaccggtcaccgctgcacgtacactgctgaccgccgagaacgcgaccacagagattgaccgcgtgctgagccaactgctgaaagaacgtaaacctgtgtacatcaacctgccggttgatgtcgccgcggcgaaagccgagaaaccagctctgagcctggagaaagaaagcagcacgttaaacaccacagaacaggtgatcctgtcgaagatcgaagaaagcctgaagaacgcccagaaaccggtcgtgatcgctgggcacgaggtgattagcttcggtctggagaagacggttacgcagtttgtgagtgaaacccacctgccgattactaccctgaactttggcaaatcggctgtggatgaatccctgccgtccttcctgggtatctacaatggttcactgagcgagattagcctcaagaactttgtggaaagcgcagacttcatcctgatgcttggtgtgaaactgacggatatcagtacgggcgcgtttacgcaccatctggacgagaacaagatgattagcctgaacattgatgaaggcatcatcttcaacaaagtcgtagaagacttcgatttccgtgcggttgttagcagcctgaacgagctgaaaggcattgaatacgaaggtcaatacattgataagcagtacgaagagttcgacccgagcgtcgcaccactgagccaagaccgtctgtggcaagcagtagaatctctgacacagtccaatgaaaccattgtggcggaacagggcacgtcgttcttcggtgcctccaccatccctctgaagagcaattcacgcttcatcggtcagccgctttggggcagcatcggctatacgtttccggcagcactgggatcacagattgcggataaggaaagtcgccatctgctgttcattggtgatggtagcctgcaactgaccgtgcaggagctgggcctggcgatccgtgagaaactgaacccgatttgtttcatcatcaacaacgatggctataccgtagagcgcgagattcatgggcctacacagccgtacaatgacatcccgatgtggaactatagcaaactgccggaaacctttggcgcgacggaagatcgcgtagttagcaagatcgttcgcacagagaacgagtttgtgagtgtcatgaaagaagcgcaggccgatgttaaccgcatgtattggattgaactggttctggagaaagaagatgcaccgaaactgctgaagaagatggggaagctgtttgcagaacagaacaaa

SEQ ID NO: 76 - protein, 547 aa, Artificial Sequence
  Variant of branched-chain keto acid decarboxylase (kdcA) from Lactococcus lactis
MYTVGDYLLDRLHELGIEEIFGVPGDYNLQFLDQIIAREDMKWIGNANELNASYMADGYARTKKAAAFLTTFGVGELSAINGLAGSYAENLPVVEIVGSPTSKVQNRGKFVHHTLADGDFKHFMKMHEPVTAARTLLTAENATTEIDRVLSQLLKERKPVYINLPVDVAAAKAEKPALSLEKESSTLNTTEQVILSKIEESLKNAQKPVVIAGHEVISFGLEKTVTQFVSETHLPITTLNFGKSAVDESLPSFLGIYNGSLSEISLKNFVESADFILMLGVKLTDISTGAFTHHLDENKMISLNIDEGIIFNKVVEDFDFRAVVSSLNELKGIEYEGQYIDKQYEEFDPSVAPLSQDRLWQAVESLTQSNETIVAEQGTSFFGASTIPLKSNSRFIGQPLWGSIGYTFPAALGSQIADKESRHLLFIGDGSLQLTVQELGLAIREKLNPICFIINNDGYTVEREIHGPTQPYNDIPMWNYSKLPETFGATEDRVVSKIVRTENEFVSVMKEAQADVNRMYWIELVLEKEDAPKLLKKMGKLFAEQNK

SEQ ID NO: 77 - DNA, 1641 bp, Artificial Sequence
  Variant of branched-chain keto acid decarboxylase (kdcA) from Lactococcus lactis
atgtacaccgttggcgactatctgctggaccgtctgcatgaactgggaattgaagaaatctttggcgtgccgggcgattacaatctgcaattcctggatcaaatcattgcgcgcgaagatatgagatggattggtaacgcgaatgaactgaatgcgagctacatggctgatggctatgcacgtacgaagaaggcggcggcgttcctgacgaccttcggtgttggtgaactgagcgcaatcaatgggttggcgggcagctatgcagagaacctgccagtcgtggaaatcgttgggagtccgacctcgaaggtgcagaacgatggcaagttcgttcatcacaccctggccgacggcgacttcaagcacttcatgaagatgcacgaaccggtcaccgctgcacgtacacttctgaccgccgagaacgcgaccacagagattgaccgcgtgctgagccaactgctgaaagaacgtaaacctgtgtacatcaacctgccggttgatgtcgccgcggcgaaagccgagaaaccagctctgagcctggagaaagaaagcagcacgttaaacaccacagaacaggtgatcctgtcgaagatcgaagaaagcctgaagaacgcccagaaaccggtcgtgatcgctgggcacgaggtgattagcttcggtctggagaagacggttacgcagtttgtgagtgaaaccaaactgccgattactaccctgaactttggcaaatcggctgtggatgaatccctgccgtccttcctgggtatctacaatggtaaactgagcgagattagcctcaagaactttgtggaaagcgcagacttcatcctgatgcttggtgtgaaactgacggatatcagtacgggcgcgtttacgcaccatctggacgagaacaagatgattagcctgaacattgatgaaggcatcatcttcaacaaagtcgtagaagacttcgatttcagcgcggttgttagcagcctgagcgagctgaaaggcattgaatacgaaggtcaatacattgataagcagtacgaagagttcattccgagcagcgcaccactgtcgcaagaccgtctgtggcaagcagtagaatctctgacacagtccaatgaaaccattgtggcggaacagggcacgtcgttcttcggtgcctccaccatcttcctgaagagcaattcacgcttcatcggtcagccgctttggggcagcatcggctatacgtttccggcagcactgggatcacagattgcggataaggaaagtcgccatctgctgttcattggtgatggtagcctgcaactgaccgtgcaggagctgggcctggcgatccgtgagaaactgaacccgatttgtttcatcatcaacaacgatggctataccgtagagcgcgagattcatgggcctacacagccgtacaatgacatcccgatgtggaactatagcaaactgccggaaacctttggcgcgacggaagatcgcgtagttagcaagatcgttcgcacagagaacgagtttgtgagtgtcatgaaggaagcgcaggccgatgttaaccgcatgtattggattgaactggttctggagaaagaagatgcaccgaaactgctgaagaagatggggaagctgtttgcagaacagaacaaa

SEQ ID NO: 78 - protein, 547 aa, Artificial Sequence
  Variant of branched-chain keto acid decarboxylase (kdcA) from Lactococcus lactis
MYTVGDYLLDRLHELGIEEIFGVPGDYNLQFLDQIIAREDMRWIGNANELNASYMADGYARTKKAAAFLTTFGVGELSAINGLAGSYAENLPVVEIVGSPTSKVQNDGKFVHHTLADGDFKHFMKMHEPVTAARTLLTAENATTEIDRVLSQLLKERKPVYINLPVDVAAAKAEKPALSLEKESSTLNTTEQVILSKIEESLKNAQKPVVIAGHEVISFGLEKTVTQFVSETKLPITTLNFGKSAVDESLPSFLGIYNGKLSEISLKNFVESADFILMLGVKLTDISTGAFTHHLDENKMISLNIDEGIIFNKVVEDFDFSAVVSSLSELKGIEYEGQYIDKQYEEFIPSSAPLSQDRLWQAVESLTQSNETIVAEQGTSFFGASTIFLKSNSRFIGQPLWGSIGYTFPAALGSQIADKESRHLLFIGDGSLQLTVQELGLAIREKLNPICFIINNDGYTVEREIHGPTQPYNDIPMWNYSKLPETFGATEDRVVSKIVRTENEFVSVMKEAQADVNRMYWIELVLEKEDAPKLLKKMGKLFAEQNK

SEQ ID NO: 79 - DNA, 1641 bp, Artificial Sequence
  Variant of branched-chain keto acid decarboxylase (kdcA) from Lactococcus lactis
atgtacaccgttggcgactatctgctggaccgtctgcatgaactgggaattgaagaaatctttggcgtgccgggcgattacaatctgcaattcctggatcaaatcattgcgcgcgaagatatgaaatggattggtaacgcgaatgaactgaatgcgagctacatggctgatggctatgcacgtacgaagaaggcggcggcgttcctgacgaccttcggtgttggtgaactgagcgcaatcaatgggttggcgggcagctatgcagagaacctgccagtcgtggaaatcgttgggagtccgacctcgaaggtgcagaaccgaggcaagttcgttcatcacaccctggccgacggcgacttcaagcacttcatgaagatgcacgaaccggtcaccgctgcacgtacactgctgaccgccgagaacgcgaccacagagattgaccgcgtgctgagccaactgctgaaagaacgtaaacctgtgtacatcaacctgccggttgatgtcgccgcggcgaaagccgagaaaccagctctgagcctggagaaagaaagctcgacgttaaacaccacagaacaggtgatcctgtcgaagatcgaagaaagcctgaagaacgcccagaaaccggtcgtgatcgctgggcacgaggtgattagcttcggtctggagaagacggttacgcagtttgtgagtgaaacccacctgccgattactaccctgaactttggcaaatcggctgtggatgaatccctgccgtccttcctgggtatctacaatggttcactgagcgagattagcctcaagaactttgtggaaagcgcagacttcatcctgatgcttggtgtgaaactgacggatatcagtacgggcgcgtttacgcaccatctggacgagaacaagatgattagcctgaacattgatgaaggcatcatcttcaacaaagtcgtagaagacttcgatttccgtgcggttgttagcagcctgaacgagctgctaggcattgaatacgaaggtcaatacattgataagcagtacgaagagttcatcccgagcgtcgcaccactgagccaagaccgtctgtggcaagcagtagaatctctgacacagtccaatgaaaccattgtggcggaacagggcacgtcgttcttcggtgcctccaccatcttcctgaagagcaattcacgcttcatcggtcagccgctttggggcagcatcggctatacgtttccggcagcactgggatcacagattgcggataaggaaagtcgccatctgctgttcattggtgatggtagcctgcaactgaccgtgcaggagctgggcctggcgatccgtgagaaactgaacccgatttgtttcatcatcaacaacgatggctataccgtagagcgcgagattcatgggcctacacagccgtacaatgacatcccgatgtggaactatagcaaactgccggaaacctttggcgcgacggaagatcgcgtagttagcaagatcgttcgcacagagaacgagtttgtgagtgtcatgaaagaagcgcaggccgatgttaaccgcatgtattggattgaactggttctggagaaagaagatgcaccgaaactgctgaagaagatggggaagctgtttgcagaacagaacaaa

SEQ ID NO: 80 - protein, 547 aa, Artificial Sequence
  Variant of branched-chain keto acid decarboxylase (kdcA) from Lactococcus lactis
MYTVGDYLLDRLHELGIEEIFGVPGDYNLQFLDQIIAREDMKWIGNANELNASYMADGYARTKKAAAFLTTFGVGELSAINGLAGSYAENLPVVEIVGSPTSKVQNRGKFVHHTLADGDFKHFMKMHEPVTAARTLLTAENATTEIDRVLSQLLKERKPVYINLPVDVAAAKAEKPALSLEKESSTLNTTEQVILSKIEESLKNAQKPVVIAGHEVISFGLEKTVTQFVSETHLPITTLNFGKSAVDESLPSFLGIYNGSLSEISLKNFVESADFILMLGVKLTDISTGAFTHHLDENKMISLNIDEGIIFNKVVEDFDFRAVVSSLNELLGIEYEGQYIDKQYEEFIPSVAPLSQDRLWQAVESLTQSNETIVAEQGTSFFGASTIFLKSNSRFIGQPLWGSIGYTFPAALGSQIADKESRHLLFIGDGSLQLTVQELGLAIREKLNPICFIINNDGYTVEREIHGPTQPYNDIPMWNYSKLPETFGATEDRVVSKIVRTENEFVSVMKEAQADVNRMYWIELVLEKEDAPKLLKKMGKLFAEQNK

SEQ ID NO: 81 - DNA, 1641 bp, Artificial Sequence
  Variant of branched-chain keto acid decarboxylase (kdcA) from Lactococcus lactis
atgtacaccgttggcgactatctgctggaccgtctgcatgaactgggaattgaagaaatctttggcgtgccgggcgattacaatctgcaattcctggatcaaatcattgcgcgcgaagatatgaaatggattggtaacgcgaatgaactgaatgcgagctacatggctgatggctatgcacgtacgaagaaggcggcggcgttcctgacgaccttcggtgttggtgaactgagcgcaatcaatgggttggcgggcagctatgcagagaacctgccagtcgtggaaatcgttgggagtccgacctcgaaggtgcagaaccgaggcaagttcgttcatcacaccctggccgacggcgacttcaagcacttcatgaagatgcacgaaccggtcaccgctgcacgtacactgctgaccgccgagaacgcgaccacagagattgaccgcgtgctgagccaactgctgaaagaacgtaaacctgtgtacatcaacctgccggttgatgtcgccgcggcgaaagccgagaaaccagctctgagcctggagaaagaaagcccgacgttaaacaccacagaacaggtgatcctgtcgaagatcgaagaaagcctgaagaacgcccagaaaccggtcgtgatcgctgggcacgaggtgattagcttcggtctggagaagacggttacgcagtttgtgagtgaaaccaagctgccgattactaccctgaactttggcaaatcggctgtggatgaatccctgccgtccttcctgggtatctacaatggtaaactgagcgagattagcctcaagaactttgtggaaagcgcagacttcatcctgatgcttggtgtgaaactgacggatatcagtacgggcgcgtttacgcaccatctggacgagaacaagatgattagcctgaacattgatgaaggcatcatcttcaacaaagtcgtagaagacttcgatttccgtgcggttgttagcagcctgagcgagctgaaaggcattgaatacgaaggtcaatacattgataagcagtacgaagagttcgacccgagcgtcgcaccactgagccaagaccgtctgtggcaagcagtagaatctctgacacagtccaatgaaaccattgtggcggaacagggcacgtcgttcttcggtgcctccaccatccctctgaagagcaattcacgcttcatcggtcagccgctttggggcagcatcggctatacgtttccggcagcactgggatcacagattgcggataaggaaagtcgccatctgctgttcattggtgatggtagcctgcaactgaccgtgcaggagctgggcctggcgatccgtgagaaactgaacccgatttgtttcatcatcaacaacgatggctataccgtagagcgcgagattcatgggcctacacagccgtacaatgacatcccgatgtggaactatagcaaactgccggaaacctttggcgcgacggaagatcgcgtagttagcaagatcgttcgcacagagaacgagtttgtgagtgtcatgaaagaagcgcaggccgatgttaaccgcatgtattggattgaactggttctggagaaagaagatgcaccgaaactgctgaagaagatggggaagctgtttgcagaacagaacaaa

SEQ ID NO: 82 - protein, 547 aa, Artificial Sequence
  Variant of branched-chain keto acid decarboxylase (kdcA) from Lactococcus lactis
MYTVGDYLLDRLHELGIEEIFGVPGDYNLQFLDQIIAREDMKWIGNANELNASYMADGYARTKKAAAFLTTFGVGELSAINGLAGSYAENLPVVEIVGSPTSKVQNRGKFVHHTLADGDFKHFMKMHEPVTAARTLLTAENATTEIDRVLSQLLKERKPVYINLPVDVAAAKAEKPALSLEKESPTLNTTEQVILSKIEESLKNAQKPVVIAGHEVISFGLEKTVTQFVSETKLPITTLNFGKSAVDESLPSFLGIYNGKLSEISLKNFVESADFILMLGVKLTDISTGAFTHHLDENKMISLNIDEGIIFNKVVEDFDFRAVVSSLSELKGIEYEGQYIDKQYEEFDPSVAPLSQDRLWQAVESLTQSNETIVAEQGTSFFGASTIPLKSNSRFIGQPLWGSIGYTFPAALGSQIADKESRHLLFIGDGSLQLTVQELGLAIREKLNPICFIINNDGYTVEREIHGPTQPYNDIPMWNYSKLPETFGATEDRVVSKIVRTENEFVSVMKEAQADVNRMYWIELVLEKEDAPKLLKKMGKLFAEQNK

SEQ ID NO: 83 - DNA, 1641 bp, Artificial Sequence
  Variant of branched-chain keto acid decarboxylase (kdcA) from Lactococcus lactis
atgtacaccgttggcgactatctgctggaccgtctgcatgaactgggaattgaagaaatctttggcgtgccgggcgattacaatctgcaattcctggatcaaatcattgcgcgcgaagatatgaaatggattggtaacgcgaatgaactgaatgcgagctacatggctgatggctatgcacgtacgaagaaggcggcggcgttcctgacgaccttcggtgttggtgaactgagcgcaatcaatgggttggcgggcagctatgcagagaacctgccagtcgtggaaatcgttgggagtccgacctcgaaggtgcagaacgatggcaagttcgttcatcacaccctggccgacggcgacttcaagcacttcatgaagatgcacgaaccggtcaccgctgcacgtacacttctgaccgccgagaacgcgaccacagagattgaccgcgtgctgagccaactgctgaaagaacgtaaacctgtgtacatcaacctgccggttgatgtcgccgcggcgaaagccgagaaaccagctctgagcctggagaaagaaagcagcacgttaaacaccacagaacaggtgatcctgtcgaagatcgaagaaagcctgaagaacgcccagaaaccggtcgtgatcgctgggcacgaggtgattagcttcggtctggagaagacggttacgcagtttgtgagtgaaaccaaactgccgattactaccctgaactttggcaaatcggctgtggatgaatccctgccgtccttcctgggtatctacaatggtaaactgagcgagattagcctcaagaactttgtggaaagcgcagacttcatcctgatgcttggtgtgaaactgacggatatcagtacgggcgcgtttacgcaccatctggacgagaacaagatgattagcctgaacattgatgaaggcatcatcttcaacaaagtcgtagaagacttcgatttccgcgcggttgttagcagcctgagcgagctgaaaggcattgaatacgaaggtgaatacattgatagacagtacgaagagttcattccgagcagcgcaccactgttgcaagaccgtctgtggcaagcagtagaatctctgacacagtccaatgaaaccattgtggcggaacagggcacgtcgttcttcggtgcctccaccatcttcctgaagagcaattcacgcttcatcggtcagccgctttggggcagcatcggctatacgtttccggcagcactgggatcacagattgcggataaggaaagtcgccatctgctgttcattggtgatggtagcctgcaactgaccgtgcaagagctgggcctggcgatccgtgagaaactgaacccgatttgtttcatcatcaacaacgatggctataccgtagagcgcgagattcatgggcctacacagccgtacaatgacatcccgatgtggaactatagcaaactgccggaaacctttggcgcgacggaagatcgcgtagttagcaagatcgttcgcacagagaacgagtttgtgagtgtcatgaaggaagcgcaggccgatgttaaccgcatgtattggattgaactggttctggagaaagaagatgcaccgaaactgctgaagaagatggggaagctgtttgcagaacagaacaaa

SEQ ID NO: 84 - protein, 547 aa, Artificial Sequence
  Variant of branched-chain keto acid decarboxylase (kdcA) from Lactococcus lactis
MYTVGDYLLDRLHELGIEEIFGVPGDYNLQFLDQIIAREDMKWIGNANELNASYMADGYARTKKAAAFLTTFGVGELSAINGLAGSYAENLPVVEIVGSPTSKVQNDGKFVHHTLADGDFKHFMKMHEPVTAARTLLTAENATTEIDRVLSQLLKERKPVYINLPVDVAAAKAEKPALSLEKESSTLNTTEQVILSKIEESLKNAQKPVVIAGHEVISFGLEKTVTQFVSETKLPITTLNFGKSAVDESLPSFLGIYNGKLSEISLKNFVESADFILMLGVKLTDISTGAFTHHLDENKMISLNIDEGIIFNKVVEDFDFRAVVSSLSELKGIEYEGEYIDRQYEEFIPSSAPLLQDRLWQAVESLTQSNETIVAEQGTSFFGASTIFLKSNSRFIGQPLWGSIGYTFPAALGSQIADKESRHLLFIGDGSLQLTVQELGLAIREKLNPICFIINNDGYTVEREIHGPTQPYNDIPMWNYSKLPETFGATEDRVVSKIVRTENEFVSVMKEAQADVNRMYWIELVLEKEDAPKLLKKMGKLFAEQNK

SEQ ID NO: 85 - DNA, 1641 bp, Artificial Sequence
  Variant of branched-chain keto acid decarboxylase (kdcA) from Lactococcus lactis
atgtacaccgttggcgactatctgctggaccgtctgcatgaactgggaattgaagaaatctttggcgtgccgggcgattacaatctgcaattcctggatcaaatcattgcgcgcgaagatatgaaatggattggtaacgcgaatgaactgaatgcgagctacatggctgatggctatgcacgtacgaagaaggcggcggcgttcctgacgaccttcggtgttggtgaactgagcgcaatcaatgggttggcgggcagctatgcagagaacctgccagtcgtggaaatcgttgggagtccgacctcgaaggtgcagaacgacggcaagttcgttcatcacaccctggccgacggcgacttcaagcacttcatgaagatgcacgaaccggtcaccgctgcacgtacactgctgaccgccgagaacgcgaccacagagattgaccgcgtgctgagccaactgctgaaagaacgtaaacctgtgtacatcaacctgccggttgatgtcgccgcggcgaaagccgagaaaccagctctgagcctggagaaagaaagcccgacgttaaacaccacagaacaggtgatcctgtcgaagatcgaagaaagcctgaagaacgcccagaaaccggtcgtgatcgctgggcacgaggtgattagcttcggtctggagaagacggttacgcagtttgtgagtgaaaccaaactgccgattactaccctgaactttggcaaatcggctgtggatgaatccctgccgtccttcctgggtatctacaatggtaagctgagcgagattagcctcaagaactttgtggaaagcgcagacttcatcctgatgcttggtgtgaaactgacggatatcagtacgggcgcgtttacgcaccatctggacgagaacaagatgattagcctgaacattgatgaaggcatcatcttcaacaaagtcgtagaagacttcgatttccgtgcggttgttagcagcctgagcgagctgaaaggcattgaatacgaaggtcaatacattgataagcagtacgaagagttcatcccgagctcagcaccactgagccaagaccgtctgtggcaagcagtagaatctctgacacagtccaatgaaaccattgtggcggaacagggcacgtcgttcttcggtgcctccaccatcttcctgaagagcaattcacgcttcatcggtcagccgctttggggcagcatcggctatacgtttccggcagcactgggatcacagattgcggataaggaaagtcgccatctgctgttcattggtgatggtagcctgcaactgaccgtgcaggagctgggcctggcgatccgtgagaaactgaacccgatttgtttcatcatcaacaacgatggctataccgtagagcgcgagattcatgggcctacacagccgtacaatgacatcccgatgtggaactatagcaaactgccggaaacctttggcgcgacggaagatcgcgtagttagcaagatcgttcgcacagagaacgagtttgtgagtgtcatgaaagaagcgcaggccgatgttaaccgcatgtattggattgaactggttctggagaaagaagatgcaccgaaactgctgaagaagatggggaagctgtttgcagaacagaacaaa

SEQ ID NO: 86 - protein, 547 aa, Artificial Sequence
  Variant of branched-chain keto acid decarboxylase (kdcA) from Lactococcus lactis
MYTVGDYLLDRLHELGIEEIFGVPGDYNLQFLDQIIAREDMKWIGNANELNASYMADGYARTKKAAAFLTTFGVGELSAINGLAGSYAENLPVVEIVGSPTSKVQNDGKFVHHTLADGDFKHFMKMHEPVTAARTLLTAENATTEIDRVLSQLLKERKPVYINLPVDVAAAKAEKPALSLEKESPTLNTTEQVILSKIEESLKNAQKPVVIAGHEVISFGLEKTVTQFVSETKLPITTLNFGKSAVDESLPSFLGIYNGKLSEISLKNFVESADFILMLGVKLTDISTGAFTHHLDENKMISLNIDEGIIFNKVVEDFDFRAVVSSLSELKGIEYEGQYIDKQYEEFIPSSAPLSQDRLWQAVESLTQSNETIVAEQGTSFFGASTIFLKSNSRFIGQPLWGSIGYTFPAALGSQIADKESRHLLFIGDGSLQLTVQELGLAIREKLNPICFIINNDGYTVEREIHGPTQPYNDIPMWNYSKLPETFGATEDRVVSKIVRTENEFVSVMKEAQADVNRMYWIELVLEKEDAPKLLKKMGKLFAEQNK

SEQ ID NO: 87 - DNA, 1641 bp, Artificial Sequence
  Variant of branched-chain keto acid decarboxylase (kdcA) from Lactococcus lactis
atgtacaccgttggcgactatctgctggaccgtctgcatgaactgggaattgaagaaatctttggcgtgccgggcgattacaatctgcaattcctggatcaaatcattgcgcgcgaagatatgaaatggattggtaacgcgaatgaactgaatgcgagctacatggctgatggctatgcacgtacgaagaaggcggcggcgttcctgacgaccttcggtgttggtgaactgagcgcaatcaatgggttggcgggcagctatgcagagaacctgccagtcgtggaaatcgttgggagtccgacctcgaaggtgcagaaccgcggcaagttcgttcatcacaccctggccgacggcgacttcaagcacttcatgaagatgcacgaaccggtcaccgctgcacgtacactgctgaccgccgagaacgcgaccacagagattgaccgcgtgctgagccaactgctgaaagaacgtaaacctgtgtacatcaacctgccggttgatgtcgccgcggcgaaagccgagaaaccagctctgagcctggagaaagaaagcagcacgttaaacaccacagaacaggtgatcctgtcgaagatcgaagaaagcctgaagaacgcccagaaaccggtcgtgatcgctgggcacgaggtgattagcttcggtctggagaagacggttacgcagtttgtgagtgaaaccaaactgccgattactaccctgaactttggcaaatcggctgtggatgaatccctgccgtccttcctgggtatctacaatggtaaactgagcgagattagcctcaagaactttgtggaaagcgcagacttcatcctgatgcttggtgtgaaactgacggatatcagtacgggcgcgtttacgcaccatctggacgagaacaagatgattagcctgaacattgatgaaggcatcatcttcaacaaagtcgtagaagacttcgatttccgtgcggttgtttttagcctgaacgagctgaagggcattgaatacgaaggtcaatacattgataagcagtacgaagagttcgacccgagcagcgcaccactgtcgcaagaccgtctgtggcaagcagtagaatctctgacacagtccaatgaaaccattgtggcggaacagggcacgtcgttcttcggtgcctccaccatcccactgaagagcaattcacgcttcatcggtcagccgctttggggcagcatcggctatacgtttccggcagcactgggatcacagattgcggataaggaaagtcgccatctgctgttcattggtgatggtagcctgcaactgaccgtgcaggagctgggcctggcgatccgtgagaaactgaacccgatttgtttcatcatcaacaacgatggctataccgtagagcgcgagattcatgggcctacacagccgtacaatgacatcccgatgtggaactatagcaaactgccggaaacctttggcgcgacggaagatcgcgtagttagcaagatcgttcgcacagagaacgagtttgtgagtgtcatgaaagaagcgcaggccgatgttaaccgcatgtattggattgaactggttctggagaaagaagatgcaccgaaactgctgaagaagatggggaagctgtttgcagaacagaacaaa

SEQ ID NO: 88 - protein, 547 aa, Artificial Sequence
  Variant of branched-chain keto acid decarboxylase (kdcA) from Lactococcus lactis
MYTVGDYLLDRLHELGIEEIFGVPGDYNLQFLDQIIAREDMKWIGNANELNASYMADGYARTKKAAAFLTTFGVGELSAINGLAGSYAENLPVVEIVGSPTSKVQNRGKFVHHTLADGDFKHFMKMHEPVTAARTLLTAENATTEIDRVLSQLLKERKPVYINLPVDVAAAKAEKPALSLEKESSTLNTTEQVILSKIEESLKNAQKPVVIAGHEVISFGLEKTVTQFVSETKLPITTLNFGKSAVDESLPSFLGIYNGKLSEISLKNFVESADFILMLGVKLTDISTGAFTHHLDENKMISLNIDEGIIFNKVVEDFDFRAVVFSLNELKGIEYEGQYIDKQYEEFDPSSAPLSQDRLWQAVESLTQSNETIVAEQGTSFFGASTIPLKSNSRFIGQPLWGSIGYTFPAALGSQIADKESRHLLFIGDGSLQLTVQELGLAIREKLNPICFIINNDGYTVEREIHGPTQPYNDIPMWNYSKLPETFGATEDRVVSKIVRTENEFVSVMKEAQADVNRMYWIELVLEKEDAPKLLKKMGKLFAEQNK

SEQ ID NO: 89 - DNA, 1641 bp, Artificial Sequence
  Variant of branched-chain keto acid decarboxylase (kdcA) from Lactococcus lactis
atgtacaccgttggcgactatctgctggaccgtctgcatgaactgggaattgaagaaatctttggcgtgccgggcgattacaatctgcaattcctggatcaaatcattgcgcgcgaagatatgaaatggattggtaacgcgaatgaactgaatgcgagctacatggctgatggctatgcacgtacgaagaaggcggcggcgttcctgacgaccttcggtgttggtgaactgagcgcaatcaatgggttggcgggcagctatgcagagaacctgccagtcgtggaaatcgttgggagtccgacctcgaaggtgcagaacgacggcaagttcgttcatcacaccctggccgacggcgacttcaagcacttctggaagatgcacgaaccggtcaccgctgcacgtacactgctgaccgccgagaacgcgaccacagagattgaccgcgtgctgagccaactgctgaaagaacgtaaacctgtgtacatcaacctgccggttgatgtcgccgcggcgaaagccgagaaaccagctctgagcctggagaaagaaagcagcacgttaaacaccacagaacaggtgatcctgtcgaagatcgaagaaagcctgaagaacgcccagaaaccggtcgtgatcgctgggcacgaggtgattagcttcggtctggagaagacggttacgcagtttgtgagtgaaaccaaactgccgattactaccctgaactttggcaaatcggctgtggatgaatccctgccgtccttcctgggtatctacaatggtagcctgagcgagattagcctcaagaactttgtggaaagcgcagacttcatcctgatgcttggtgtgaaactgacggatatcagtacgggcgcgtttacgcaccatctggacgagaacaagatgattagcctgaacattgatgaaggcatcatcttcaacaaagtcgtagaagacttcgatttccgtgcggttgtttctagcctgagcgagctgcttggcattgaatacgaaggtcaatacattgataagcagtacgaagagttcattccgagcagcgcaccactgttgcaagaccgtctgtggcaagcagtagaatctctgacacagtccaatgaaaccattgtggcggaacagggcacgtcgttcttcggtgcctccaccatcttcctgaagagcaattcacgcttcatcggtcagccgctttggggcagcatcggctatacgtttccggcagcactgggatcacagattgcggataaggaaagtcgccatctgctgttcattggtgatggtagcctgcaactgaccgtgcaggagctgggcctggcgatccgtgagagactgaacccgatttgtttcatcatcaacaacgatggctataccgtagagcgcgagattcatgggcctacacagccgtacaatgacatcccgatgtggaactatagcaaactgccggaaacctttggcgcgacggaagatcgcgtagttagcaagatcgttcgcacagagaacgagtttgtgagtgtcatgaaagaagcgcaggccgatgttaaccgcatgtattggattgaactggttctggagaaagaagatgcaccgaaactgctgaagaagatggggaagctgtttgcagaacagaacaaa

SEQ ID NO: 90 - protein, 547 aa, Artificial Sequence
  Variant of branched-chain keto acid decarboxylase (kdcA) from Lactococcus lactis
MYTVGDYLLDRLHELGIEEIFGVPGDYNLQFLDQIIAREDMKWIGNANELNASYMADGYARTKKAAAFLTTFGVGELSAINGLAGSYAENLPVVEIVGSPTSKVQNDGKFVHHTLADGDFKHFWKMHEPVTAARTLLTAENATTEIDRVLSQLLKERKPVYINLPVDVAAAKAEKPALSLEKESSTLNTTEQVILSKIEESLKNAQKPVVIAGHEVISFGLEKTVTQFVSETKLPITTLNFGKSAVDESLPSFLGIYNGSLSEISLKNFVESADFILMLGVKLTDISTGAFTHHLDENKMISLNIDEGIIFNKVVEDFDFRAVVSSLSELLGIEYEGQYIDKQYEEFIPSSAPLLQDRLWQAVESLTQSNETIVAEQGTSFFGASTIFLKSNSRFIGQPLWGSIGYTFPAALGSQIADKESRHLLFIGDGSLQLTVQELGLAIRERLNPICFIINNDGYTVEREIHGPTQPYNDIPMWNYSKLPETFGATEDRVVSKIVRTENEFVSVMKEAQADVNRMYWIELVLEKEDAPKLLKKMGKLFAEQNK

SEQ ID NO: 91 - DNA, 1641 bp, Artificial Sequence
  Variant of branched-chain keto acid decarboxylase (kdcA) from Lactococcus lactis
atgtacaccgttggcgactatctgctggaccgtctgcatgaactgggaattgaagaaatctttggcgtgccgggcgattacaatctgcaattcctggatcaaatcattgcgcgcgaagatatgaaatggattggtaacgcgaatgaactgaatgcgagctacatggctgatggctatgcacgtacgaagaaggcggcggcgttcctgacgaccttcggtgttggtgaactgagcgcaatcaatgggttggcgggcagctatgcagagaacctgccagtcgtggaaatcgttgggagtccgacctcgaaggtgcagaacgatggcaagttcgttcatcacaccctggccgacggcgacttcaagcacttcaggaagatgcacgaaccggtcaccgctgcacgtacacatctgaccgccgagaacgcgaccacagagattgaccgcgtgctgagccaactgctgaaagaacgtaaacctgtgtacatcaacctgccggttgatgtcgccgcggcgaaagccgagaaaccagctctgagcctggagaaagaaagcagcacgttaaacaccacagaacaggtgatcctgtcgaagatcgaagaaagcctgaagaacgcccagaaaccggtcgtgatcgctgggcacgaggtgattagcttcggtctggagaagacggttacgcagtttgtgagtgaaaccaaactgccgattactaccctgaactttggcaaatcggctgtggatgaatccctgccgtccttcctgggtatctacaatggtaaactgagcgagattagcctcaagaactttgtggaaagcgcagacttcatcctgatgcttggtgtgaaactgacggatatcagtacgggcgcgtttacgcaccatctggacgagaacaagatgattagcctgaacattgatgaaggcatcatcttcaacaaagtcgtagaagacttcgatttccgcgcggttgttagcagcctgttggagctgaccggcattgaatacgaaggtcaatacattgataaacagtacgaagagttcattccgagcagcgcaccactgatgcaagaccgtctgtggcaagcagtagaatctctgacacagtccaatgaaaccattgtggcggaacagggcacgtcgttcttcggtgcctccaccatcttcctgaagagcaattcacgcttcatcggtcagccgctttggggcagcatcggctatacgtttccggcagcactgggatcacagattgcggataaggaaagtcgccatctgctgttcattggtgatggtagcctgcaactgaccgtgagcgagctgggcctggcgatccgtgagaaactgaacccgatttgtttcatcatcaacaacgatggctataccgtagagcgcgagattcatgggcctacacagccgtacaatgacatcccgatgtggaactatagcaaactgccggaaacctttggcgcgacggaagatcgcgtagttagcaagatcgttcgcacagagaacgagtttgtgagtgtcatgttcgaagcgcaggccgatgttaaccgcatgtattggattgaactggttctggagaaagaagatgcaccgaaactgctgaagaagatggggaagctgtttgcagaacagaacaaa

SEQ ID NO: 92 - protein, 547 aa, Artificial Sequence
  Variant of branched-chain keto acid decarboxylase (kdcA) from Lactococcus lactis
MYTVGDYLLDRLHELGIEEIFGVPGDYNLQFLDQIIAREDMKWIGNANELNASYMADGYARTKKAAAFLTTFGVGELSAINGLAGSYAENLPVVEIVGSPTSKVQNDGKFVHHTLADGDFKHFRKMHEPVTAARTHLTAENATTEIDRVLSQLLKERKPVYINLPVDVAAAKAEKPALSLEKESSTLNTTEQVILSKIEESLKNAQKPVVIAGHEVISFGLEKTVTQFVSETKLPITTLNFGKSAVDESLPSFLGIYNGKLSEISLKNFVESADFILMLGVKLTDISTGAFTHHLDENKMISLNIDEGIIFNKVVEDFDFRAVVSSLLELTGIEYEGQYIDKQYEEFIPSSAPLMQDRLWQAVESLTQSNETIVAEQGTSFFGASTIFLKSNSRFIGQPLWGSIGYTFPAALGSQIADKESRHLLFIGDGSLQLTVSELGLAIREKLNPICFIINNDGYTVEREIHGPTQPYNDIPMWNYSKLPETFGATEDRVVSKIVRTENEFVSVMFEAQADVNRMYWIELVLEKEDAPKLLKKMGKLFAEQNK

SEQ ID NO: 93 - DNA, 1641 bp, Artificial Sequence
  Variant of branched-chain keto acid decarboxylase (kdcA) from Lactococcus lactis
atgtacaccgttggcgactatctgctggaccgtctgcatgaactgggaattgaagaaatctttggcgtgccgggcgattacaatctgcaattcctggatcaaatcattgcgcgcgaagatatgagatggattggtaacgcgaatgaactgaatgcgagctacatggctgatggctatgcacgtacgaagaaggcggcggcgttcctgacgaccttcggtgttggtgaactgagcgcaatcaatgggttggcgggcagctatgcagagaacctgccagtcgtggaaatcgttgggagtccgacctcgaaggtgcagaacgatggcaagttcgttcatcacaccctggccgacggcgacttcaagcacttcatgaagatgcacgaaccggtcaccgctgcacgtacacttctgaccgccgagaacgcgaccacagagattgaccgcgtgctgagccaactgctgaaagaacgtaaacctgtgtacatcaacctgccggttgatgtcgccgcggcgaaagccgagaaaccagctctgagcctggagaaagaaagcagcacgttaaacaccacagaacaggtgatcctgtcgaagatcgaagaaagcctgaagaacgcccagaaaccggtcgtgatcgctgggcacgaggtgattagcttcggtctggagaagacggttacgcagtttgtgagtgaaaccaaactgccgattactaccctgaactttggcaaatcggctgtggatgaatccctgccgtccttcctgggtatctacaatggtaaactgagcgagattagcctcaagaactttgtggaaagcgcagacttcatcctgatgcttggtgtgaaactgacggatatcagtacgggcgcgtttacgcaccatctggacgagaacaagatgattagcctgaacattgatgaaggcatcatcttcaacaaagtcgtagaagacttcgatttccgtgcggttgttagcagcctgttggagctgaaaggcattgaatacgaaggtcaatacattgataagcagtacgaagagttcattccgagcagcgcaccactgagccaagaccgtctgtggcaagcagtagaatctctgacacagtccaatgaaaccattgtggcggaacagggcacgtcgttcttcggtgcctccaccatcttcctgaagagcaattcacgcttcatcggtcagccgctttggggcagcatcggctatacgtttccggcagcactgggatcacagattgcggataaggaaagtcgccatctgctgttcattggtgatggtagcctgcaactgaccgtgcaagagctgggcctggcgatccgtgagaaactgaacccgatttgtttcatcatcaacaacgatggctataccgtagagcgcgagattcatgggcctacacagccgtacaatgacatcccgatgtggaactatagcaaactgccggaaacctttggcgcgacggaagatcgcgtagttagcaagatcgttcgcacagagaacgagtttgtgagtgtcatgaaagaagcgcaggccgatgttaaccgcatgtattggattgaactggttctggagaaagaagatgcaccgaaactgctgaagaagatggggaagctgtttgcagaacagaacaaa

SEQ ID NO: 94 - protein, 547 aa, Artificial Sequence
  Variant of branched-chain keto acid decarboxylase (kdcA) from Lactococcus lactis
MYTVGDYLLDRLHELGIEEIFGVPGDYNLQFLDQIIAREDMRWIGNANELNASYMADGYARTKKAAAFLTTFGVGELSAINGLAGSYAENLPVVEIVGSPTSKVQNDGKFVHHTLADGDFKHFMKMHEPVTAARTLLTAENATTEIDRVLSQLLKERKPVYINLPVDVAAAKAEKPALSLEKESSTLNTTEQVILSKIEESLKNAQKPVVIAGHEVISFGLEKTVTQFVSETKLPITTLNFGKSAVDESLPSFLGIYNGKLSEISLKNFVESADFILMLGVKLTDISTGAFTHHLDENKMISLNIDEGIIFNKVVEDFDFRAVVSSLLELKGIEYEGQYIDKQYEEFIPSSAPLSQDRLWQAVESLTQSNETIVAEQGTSFFGASTIFLKSNSRFIGQPLWGSIGYTFPAALGSQIADKESRHLLFIGDGSLQLTVQELGLAIREKLNPICFIINNDGYTVEREIHGPTQPYNDIPMWNYSKLPETFGATEDRVVSKIVRTENEFVSVMKEAQADVNRMYWIELVLEKEDAPKLLKKMGKLFAEQNK

SEQ ID NO: 95 - DNA, 1641 bp, Artificial Sequence
  Variant of branched-chain keto acid decarboxylase (kdcA) from Lactococcus lactis
atgtacaccgttggcgactatctgctggaccgtctgcatgaactgggaattgaagaaatctttggcgtgccgggcgattacaatctgcaattcctggatcaaatcattgcgcgcgaagatatgaaatggattggtaacgcgaatgaactgaatgcgagctacatggctgatggctatgcacgtacgaagaaggcggcggcgttcctgacgaccttcggtgttggtgaactgagcgcaatcaatgggttggcgggcagctatgcagagaacctgccagtcgtggaaatcgttgggagtccgacctcgaaggtgcagaacgacggcaagttcgttcatcacaccctggccgacggcgacttcaagcacttcatgaagatgcacgaaccggtcaccgctgcacgtacactgctgaccgccgagaacgcgaccacagagattgaccgcgtgctgagccaactgctgaaagaacgtaaacctgtgtacatcaacctgccggttgatgtcgccgcggcgaaagccgagaaaccagctctgagcctggagaaagaaagcagcacgttaaacaccacagaacaggtgatcctgtcgaagatcgaagaaagcctgaagaacgcccagaaaccggtcgtgatcgctgggcacgaggtgattagcttcggtctggagaagacggttacgcagtttgtgagtgaaaccaaactgccgattactaccctgaactttggcaaatcggctgtggatgaatccctgccgtccttcctgggtatctacaatggtaaactgagcgagattagcctcaagaactttgtggaaagcgcagacttcatcctgatgcttggtgtgaaactgacggatatcagtacgggcgcgtttacgcaccatctggacgagaacaagatgattagcctgaacattgatgaaggcatcatcttcaacaaagtcgtagaagacttcgatttccgtgcggttgttagcagcctgagcgagctgaaaggcattgaatacgaaggtcaatacattgataagcagtacgaagagttcattccgagcagcgcaccactgagccaagaccgtctgtggcaagcagtagaatctctgacacagtccaatgaaaccattgtggcggaacagggcacgtcgttcttcggtgcctccaccatccctctgaagagcaattcacgcttcatcggtcagccgctttggggcagcatcggctatacgtttccggcagcactgggatcacagattgcggataaggaaagtcgccatctgctgttcattggtgatggtagcctgcaactgaccgtgcaggagctgggcctggcgatccgtgagaaactgaacccgatttgtttcatcatcaacaacgatggctataccgtagagcgcgagattcatgggcctacacagccgtacaatgacatcccgatgtggaactatagcaaactgccggaaacctttggcgcgacggaagatcgcgtagttagcaagatcgttcgcacagagaacgagtttgtgagtgtcatgaaagaagcgcaggccgatgttaaccgcatgtattggattgaactggttctggagaaagaagatgcaccgaaactgctgaagaagatggggaagctgtttgcagaacagaacaaa

SEQ ID NO: 96 - protein, 547 aa, Artificial Sequence
  Variant of branched-chain keto acid decarboxylase (kdcA) from Lactococcus lactis
MYTVGDYLLDRLHELGIEEIFGVPGDYNLQFLDQIIAREDMKWIGNANELNASYMADGYARTKKAAAFLTTFGVGELSAINGLAGSYAENLPVVEIVGSPTSKVQNDGKFVHHTLADGDFKHFMKMHEPVTAARTLLTAENATTEIDRVLSQLLKERKPVYINLPVDVAAAKAEKPALSLEKESSTLNTTEQVILSKIEESLKNAQKPVVIAGHEVISFGLEKTVTQFVSETKLPITTLNFGKSAVDESLPSFLGIYNGKLSEISLKNFVESADFILMLGVKLTDISTGAFTHHLDENKMISLNIDEGIIFNKVVEDFDFRAVVSSLSELKGIEYEGQYIDKQYEEFIPSSAPLSQDRLWQAVESLTQSNETIVAEQGTSFFGASTIPLKSNSRFIGQPLWGSIGYTFPAALGSQIADKESRHLLFIGDGSLQLTVQELGLAIREKLNPICFIINNDGYTVEREIHGPTQPYNDIPMWNYSKLPETFGATEDRVVSKIVRTENEFVSVMKEAQADVNRMYWIELVLEKEDAPKLLKKMGKLFAEQNK

SEQ ID NO: 97 - DNA, 1641 bp, Artificial Sequence
  Variant of branched-chain keto acid decarboxylase (kdcA) from Lactococcus lactis
atgtacaccgttggcgactatctgctggaccgtctgcatgaactgggaattgaagaaatctttggcgtgccgggcgattacaatctgcaattcctggatcaaatcattgcgcgcgaagatatgaaatggattggtaacgcgaatgaactgaatgcgagctacatggctgatggctatgcacgtacgaagaaggcggcggcgttcctgacgaccttcggtgttggtgaactgagcgcaatcaatgggttggcgggcagctatgcagagaacctgccagtcgtggaaatcgttgggagtccgacctcgaaggtgcagaacgatggcaagttcgttcatcacaccctggccgacggcgacttcaagcacttcatgaagatgcacgaaccggtcaccgctgcacgtacactgctgaccgccgagaacgcgaccacagagattgaccgcgtgctgagccaactgctgaaagaacgtaaacctgtgtacatcaacctgccggttgatgtcgccgcggcgaaagccgagaaaccagctctgagcctggagaaagaaagcagcacgttaaacaccacagaacaggtgatcctgtcgaagatcgaagaaagcctgaagaacgcccagaaaccggtcgtgatcgctgggcacgaggtgattagcttcggtctggagaagacggttacgcagtttgtgagtgaaaccaaactgccgattactaccctgaactttggcaaatcggctgtggatgaatccctgccgtccttcctgggtatctacaatggtaaactgagcgagattagcctcaagaactttgtggaaagcgcagacttcatcctgatgcttggtgtgaaactgacggatatcagtacgggcgcgtttacgcaccatctggacgagaacaagatgattagcctgaacattgatgaaggcatcatcttcaacaaagtcgtagaagacttcgatttccgcgcggttgttagcagcctgagcgagctgaaaggcattgaatacgaaggtgaatacattgatagacagtacgaagagttcattccgagcagcgcaccactgtcgcaagaccgtctgtggcaagcagtagaatctctgacacagtccaatgaaaccattgtggcggaacagggcacgtcgttcttcggtgcctccaccatcttcctgaagagcaattcacgcttcatcggtcagccgctttggggcagcatcggctatacgtttccggcagcactgggatcacagattgcggataaggaaagtcgccatctgctgttcattggtgatggtagcctgcaactgaccgtgcaagagctgggcctggcgatccgtgagaaactgaacccgatttgtttcatcatcaacaacgatggctataccgtagagcgcgagattcatgggcctacacagccgtacaatgacatcccgatgtggaactatagcaaactgccggaaacctttggcgcgacggaagatcgcgtagttagcaagatcgttcgcacagagaacgagtttgtgagtgtcatgttcgaagcgcaggccgatgttaaccgcatgtattggattgaactggttctggagaaagaagatgcaccgaaactgctgaagaagatggggaagctgtttgcagaacagaacaaa

SEQ ID NO: 98 - protein, 547 aa, Artificial Sequence
  Variant of branched-chain keto acid decarboxylase (kdcA) from Lactococcus lactis
MYTVGDYLLDRLHELGIEEIFGVPGDYNLQFLDQIIAREDMKWIGNANELNASYMADGYARTKKAAAFLTTFGVGELSAINGLAGSYAENLPVVEIVGSPTSKVQNDGKFVHHTLADGDFKHFMKMHEPVTAARTLLTAENATTEIDRVLSQLLKERKPVYINLPVDVAAAKAEKPALSLEKESSTLNTTEQVILSKIEESLKNAQKPVVIAGHEVISFGLEKTVTQFVSETKLPITTLNFGKSAVDESLPSFLGIYNGKLSEISLKNFVESADFILMLGVKLTDISTGAFTHHLDENKMISLNIDEGIIFNKVVEDFDFRAVVSSLSELKGIEYEGEYIDRQYEEFIPSSAPLSQDRLWQAVESLTQSNETIVAEQGTSFFGASTIFLKSNSRFIGQPLWGSIGYTFPAALGSQIADKESRHLLFIGDGSLQLTVQELGLAIREKLNPICFIINNDGYTVEREIHGPTQPYNDIPMWNYSKLPETFGATEDRVVSKIVRTENEFVSVMFEAQADVNRMYWIELVLEKEDAPKLLKKMGKLFAEQNK

SEQ ID NO: 99 - DNA, 1641 bp, Artificial Sequence
  Variant of branched-chain keto acid decarboxylase (kdcA) from Lactococcus lactis
atgtacaccgttggcgactatctgctggaccgtctgcatgaactgggaattgaagaaatctttggcgtgccgggcgattacaatctgcaattcctggatcaaatcattgcgcgcgaagatatgaaatggattggtaacgcgaatgaactgaatgcgagctacatggctgatggctatgcacgtacgaagaaggcggcggcgttcctgacgaccttcggtgttggtgaactgagcgcaatcaatgggttggcgggcagctatgcagagaacctgccagtcgtggaaatcgttgggagtccgacctcgaaggtgcagaacgatggcaagttcgttcatcacaccctggccgacggcgacttcaagcacttcatgaagatgcacgaaccggtcaccgctgcacgtacacatctgaccgccgagaacgcgaccacagagattgaccgcgtgctgagccaactgctgaaagaacgtaaacctgtgtacatcaacctgccggttgatgtcgccgcggcgaaagccgagaaaccagctctgagcctggagaaagaaagcagcacgttaaacaccacagaacaggtgatcctgtcgaagatcgaagaaagcctgaagtgggcccagaaaccggtcgtgatcgctgggcacgaggtgattagcttcggtctggagaagacggttacgcagtttgtgagtgaaaccaaactgccgattactaccctgaactttggcaaatcggctgtggatgaatccctgccgtccttcctgggtatctacaatggtaaactgagcgagattagcctcaagaactttgtggaaagcgcagacttcatcctgatgcttggtgtgaaactgacggatatcagtacgggcgcgtttacgcaccatctggacgagaacaagatgattagcctgaacattgatgaaggcatcatcttcaacaaagtcgtagaagacttcgatttccgcgcggttgttagcagcctgttggagctgaacggcattgaatacgaaggtcaatacattgataaacagtacgaagagttcattccgagcagcgcaccactgatgcaagaccgtctgtggcaagcagtagaatctctgacacagtccaatgaaaccattgtggcggaacagggcacgtcgttcttcggtgcctccaccatcttcctgaagagcaattcacgcttcatcggtcagccgctttggggcagcatcggctatacgtttccggcagcactgggatcacagattgcggataaggaaagtcgccatctgctgttcattggtgatggtagcctgcaactgaccgtgagcgagctgggcctggcgatccgtgagaaactgaacccgatttgtttcatcatcaacaacgatggctataccgtagagcgcgagattcatgggcctacacagccgtacaatgacatcccgatgtggaactatagcaaactgccggaaacctttggcgcgacggaagatcgcgtagttagcaagatcgttcgcacagagaacgagtttgtgagtgtcatgaaagaagcgcaggccgatgttaaccgcatgtattggattgaactggttctggagaaagaagatgcaccgaaactgctgaagaagatggggaagctgtttgcagaacagaacaaa

SEQ ID NO: 100 - protein, 547 aa, Artificial Sequence
  Variant of branched-chain keto acid decarboxylase (kdcA) from Lactococcus lactis
MYTVGDYLLDRLHELGIEEIFGVPGDYNLQFLDQIIAREDMKWIGNANELNASYMADGYARTKKAAAFLTTFGVGELSAINGLAGSYAENLPVVEIVGSPTSKVQNDGKFVHHTLADGDFKHFMKMHEPVTAARTHLTAENATTEIDRVLSQLLKERKPVYINLPVDVAAAKAEKPALSLEKESSTLNTTEQVILSKIEESLKWAQKPVVIAGHEVISFGLEKTVTQFVSETKLPITTLNFGKSAVDESLPSFLGIYNGKLSEISLKNFVESADFILMLGVKLTDISTGAFTHHLDENKMISLNIDEGIIFNKVVEDFDFRAVVSSLLELNGIEYEGQYIDKQYEEFIPSSAPLMQDRLWQAVESLTQSNETIVAEQGTSFFGASTIFLKSNSRFIGQPLWGSIGYTFPAALGSQIADKESRHLLFIGDGSLQLTVSELGLAIREKLNPICFIINNDGYTVEREIHGPTQPYNDIPMWNYSKLPETFGATEDRVVSKIVRTENEFVSVMKEAQADVNRMYWIELVLEKEDAPKLLKKMGKLFAEQNK

SEQ ID NO: 101 - DNA, 1641 bp, Artificial Sequence
  Variant of branched-chain keto acid decarboxylase (kdcA) from Lactococcus lactis
atgtacaccgttggcgactatctgctggaccgtctgcatgaactgggaattgaagaaatctttggcgtgccgggcgattacaatctgcaattcctggatcaaatcattgcgcgcgaagatatgaaatggattggtaacgcgaatgaactgaatgcgagctacatggctgatggctatgcacgtacgaagaaggcggcggcgttcctgacgaccttcggtgttggtgaactgagcgcaatcaatgggttggcgggcagctatgcagagaacctgccagtcgtggaaatcgttgggagtccgacctcgaaggtgcagaaccgaggcaagttcgttcatcacaccctggccgacggcgacttcaagcacttcatgaagatgcacgaaccggtcaccgctgcacgtacactgctgaccgccgagaacgcgaccacagagattgaccgcgtgctgagccaactgctgaaagaacgtaaacctgtgtacatcaacctgccggttgatgtcgccgcggcgaaagccgagaaaccagctctgagcctggagaaatacagctcgacgttaaacaccacagaacaggtgatcctgtcgaagatcgaagaaagcctgaagaacgcccagaaaccggtcgtgatcgctgggcacgaggtgattagcttcggtctggagaagacggttacgcagtttgtgagtgaaaccaagctgccgattactaccctgaactttggcaaatcggctgtggatgaatccctgccgtccttcctgggtatctacaatggtaaactgagcgagattagcctcaagaactttgtggaaagcgcagacttcatcctgatgcttggtgtgaaactgacggatatcagtacgggcgcgtttacgcaccatctggacgagaacaagatgattagcctgaacattgatgaaggcatcatcttcaacaaagtcgtagaagacttcgatttccgtgcggttgttagcagcctgagcgagctgaaaggcattgaatacgaaggtcaatacattgataagcagtacgaagagttcgacccgagcgtcgcaccactgagccaagaccgtctgtggcaagcagtagaatctctgacacagtccaatgaaaccattgtggcggaacagggcacgtcgttcttcggtgcctccaccatcttcctgaagagcaattcacgcttcatcggtcagccgctttggggcagcatcggctatacgtttccggcagcactgggatcacagattgcggataaggaaagtcgccatctgctgttcattggtgatggtagcctgcaactgaccgtgcaggagctgggcctggcgatccgtgagaaactgaacccgatttgtttcatcatcaacaacgatggctataccgtagagcgcgagattcatgggcctacacagccgtacaatgacatcccgatgtggaactatagcaaactgccggaaacctttggcgcgacggaagatcgcgtagttagcaagatcgttcgcacagagaacgagtttgtgagtgtcatgaaagaagcgcaggccgatgttaaccgcatgtattggattgaactggttctggagaaagaagatgcaccgaaactgctgaagaagatggggaagctgtttgcagaacagaacaaa

SEQ ID NO: 102 - protein, 547 aa, Artificial Sequence
  Variant of branched-chain keto acid decarboxylase (kdcA) from Lactococcus lactis
MYTVGDYLLDRLHELGIEEIFGVPGDYNLQFLDQIIAREDMKWIGNANELNASYMADGYARTKKAAAFLTTFGVGELSAINGLAGSYAENLPVVEIVGSPTSKVQNRGKFVHHTLADGDFKHFMKMHEPVTAARTLLTAENATTEIDRVLSQLLKERKPVYINLPVDVAAAKAEKPALSLEKYSSTLNTTEQVILSKIEESLKNAQKPVVIAGHEVISFGLEKTVTQFVSETKLPITTLNFGKSAVDESLPSFLGIYNGKLSEISLKNFVESADFILMLGVKLTDISTGAFTHHLDENKMISLNIDEGIIFNKVVEDFDFRAVVSSLSELKGIEYEGQYIDKQYEEFDPSVAPLSQDRLWQAVESLTQSNETIVAEQGTSFFGASTIFLKSNSRFIGQPLWGSIGYTFPAALGSQIADKESRHLLFIGDGSLQLTVQELGLAIREKLNPICFIINNDGYTVEREIHGPTQPYNDIPMWNYSKLPETFGATEDRVVSKIVRTENEFVSVMKEAQADVNRMYWIELVLEKEDAPKLLKKMGKLFAEQNK

SEQ ID NO: 103 - DNA, 1641 bp, Artificial Sequence
  Variant of branched-chain keto acid decarboxylase (kdcA) from Lactococcus lactis
atgtacaccgttggcgactatctgctggaccgtctgcatgaactgggaattgaagaaatctttggcgtgccgggcgattacaatctgcaattcctggatcaaatcattgcgcgcgaagatatgagatggattggtaacgcgaatgaactgaatgcgagctacatggctgatggctatgcacgtacgaagaaggcggcggcgttcctgacgaccttcggtgttggtgaactgagcgcaatcaatgggttggcgggcagctatgcagagaacctgccagtcgtggaaatcgttgggagtccgacctcgaaggtgcagaacgatggcaagttcgttcatcacaccctggccgacggcgacttcaagcacttcaggaagatgcacgaaccggtcaccgctgcacgtacacatctgaccgccgagaacgcgaccacagagattgaccgcgtgctgagccaactgctgaaagaacgtaaacctgtgtacatcaacctgccggttgatgtcgccgcggcgaaagccgagaaaccagctctgagcctggagaaagaaagcagcacgttaaacaccacagaacaggtgatcctgtcgaagatcgaagaaagcctgaagtgggcccagaaaccggtcgtgatcgctgggcacgaggtgattagcttcggtctggagaagacggttacgcagtttgtgagtgaaaccaaactgccgattactaccctgaactttggcaaatcggctgtggatgaatccctgccgtccttcctgggtatctacaatggtaaactgagcgagattagcctcaagaactttgtggaaagcgcagacttcatcctgatgcttggtgtgaaactgacggatatcagtacgggcgcgtttacgcaccatctggacgagaacaagatgattagcctgaacattgatgaaggcatcatcttcaacaaagtcgtagaagacttcgatttcagcgcggttgttagcagcctgttggagctgaaaggcattgaatacgaaggtcaatacattgataagcagtacgaagagttcattccgagcagcgcaccactgtcgcaagaccgtctgtggcaagcagtagaatctctgacacagtccaatgaaaccattgtggcggaacagggcacgtcgttcttcggtgcctccaccatcttcctgaagagcaattcacgcttcatcggtcagccgctttggggcagcatcggctatacgtttccggcagcactgggatcacagattgcggataaggaaagtcgccatctgctgttcattggtgatggtagcctgcaactgaccgtgagcgagctgggcctggcgatccgtgagaaactgaacccgatttgtttcatcatcaacaacgatggctataccgtagagcgcgagattcatgggcctacacagccgtacaatgacatcccgatgtggaactatagcaaactgccggaaacctttggcgcgacggaagatcgcgtagttagcaagatcgttcgcacagagaacgagtttgtgagtgtcatgttcgaagcgcaggccgatgttaaccgcatgtattggattgaactggttctggagaaagaagatgcaccgaaactgctgaagaagatggggaagctgtttgcagaacagaacaaa

SEQ ID NO: 104 - protein, 547 aa, Artificial Sequence
  Variant of branched-chain keto acid decarboxylase (kdcA) from Lactococcus lactis
MYTVGDYLLDRLHELGIEEIFGVPGDYNLQFLDQIIAREDMRWIGNANELNASYMADGYARTKKAAAFLTTFGVGELSAINGLAGSYAENLPVVEIVGSPTSKVQNDGKFVHHTLADGDFKHFRKMHEPVTAARTHLTAENATTEIDRVLSQLLKERKPVYINLPVDVAAAKAEKPALSLEKESSTLNTTEQVILSKIEESLKWAQKPVVIAGHEVISFGLEKTVTQFVSETKLPITTLNFGKSAVDESLPSFLGIYNGKLSEISLKNFVESADFILMLGVKLTDISTGAFTHHLDENKMISLNIDEGIIFNKVVEDFDFSAVVSSLLELKGIEYEGQYIDKQYEEFIPSSAPLSQDRLWQAVESLTQSNETIVAEQGTSFFGASTIFLKSNSRFIGQPLWGSIGYTFPAALGSQIADKESRHLLFIGDGSLQLTVSELGLAIREKLNPICFIINNDGYTVEREIHGPTQPYNDIPMWNYSKLPETFGATEDRVVSKIVRTENEFVSVMFEAQADVNRMYWIELVLEKEDAPKLLKKMGKLFAEQNK

SEQ ID NO: 105 - DNA, 1641 bp, Artificial Sequence
  Variant of branched-chain keto acid decarboxylase (kdcA) from Lactococcus lactis
atgtacaccgttggcgactatctgctggaccgtctgcatgaactgggaattgaagaaatctttggcgtgccgggcgattacaatctgcaattcctggatcaaatcattgcgcgcgaagatatgaaatggattggtaacgcgaatgaactgaatgcgagctacatggctgatggctatgcacgtacgaagaaggcggcggcgttcctgacgaccttcggtgttggtgaactgagcgcaatcaatgggttggcgggcagctatgcagagaacctgccagtcgtggaaatcgttgggagtccgacctcgaaggtgcagaacgatggcaagttcgttcatcacaccctggccgacggcgacttcaagcacttcaggaagatgcacgaaccggtcaccgctgcacgtacacttctgaccgccgagaacgcgaccacagagattgaccgcgtgctgagccaactgctgaaagaacgtaaacctgtgtacatcaacctgccggttgatgtcgccgcggcgaaagccgagaaaccagctctgagcctggagaaagaaagcagcacgttaaacaccacagaacaggtgatcctgtcgaagatcgaagaaagcctgaagaacgcccagaaaccggtcgtgatcgctgggcacgaggtgattagcttcggtctggagaagacggttacgcagtttgtgagtgaaaccaaactgccgattactaccctgaactttggcaaatcggctgtggatgaatccctgccgtccttcctgggtatctacaatggtaaactgagcgagattagcctcaagaactttgtggaaagcgcagacttcatcctgatgcttggtgtgaaactgacggatatcagtacgggcgcgtttacgcaccatctggacgagaacaagatgattagcctgaacattgatgaaggcatcatcttcaacaaagtcgtagaagacttcgatttccgtgcggttgttagcagcctgagcgagctgaaaggcattgaatacgaaggtcaatacattgataagcagtacgaagagttcattccgagcagcgcaccactgatgcaagaccgtctgtggcaagcagtagaatctctgacacagtccaatgaaaccattgtggcggaacagggcacgtcgttcttcggtgcctccaccatcttcctgaagagcaattcacgcttcatcggtcagccgctttggggcagcatcggctatacgtttccggcagcactgggatcacagattgcggataaggaaagtcgccatctgctgttcattggtgatggtagcctgcaactgaccgtgcaagagctgggcctggcgatccgtgagaaactgaacccgatttgtttcatcatcaacaacgatggctataccgtagagcgcgagattcatgggcctacacagccgtacaatgacatcccgatgtggaactatagcaaactgccggaaacctttggcgcgacggaagatcgcgtagttagcaagatcgttcgcacagagaacgagtttgtgagtgtcatgaaagaagcgcaggccgatgttaaccgcatgtattggattgaactggttctggagaaagaagatgcaccgaaactgctgaagaagatggggaagctgtttgcagaacagaacaaa

SEQ ID NO: 106 - protein, 547 aa, Artificial Sequence
  Variant of branched-chain keto acid decarboxylase (kdcA) from Lactococcus lactis
MYTVGDYLLDRLHELGIEEIFGVPGDYNLQFLDQIIAREDMKWIGNANELNASYMADGYARTKKAAAFLTTFGVGELSAINGLAGSYAENLPVVEIVGSPTSKVQNDGKFVHHTLADGDFKHFRKMHEPVTAARTLLTAENATTEIDRVLSQLLKERKPVYINLPVDVAAAKAEKPALSLEKESSTLNTTEQVILSKIEESLKNAQKPVVIAGHEVISFGLEKTVTQFVSETKLPITTLNFGKSAVDESLPSFLGIYNGKLSEISLKNFVESADFILMLGVKLTDISTGAFTHHLDENKMISLNIDEGIIFNKVVEDFDFRAVVSSLSELKGIEYEGQYIDKQYEEFIPSSAPLMQDRLWQAVESLTQSNETIVAEQGTSFFGASTIFLKSNSRFIGQPLWGSIGYTFPAALGSQIADKESRHLLFIGDGSLQLTVQELGLAIREKLNPICFIINNDGYTVEREIHGPTQPYNDIPMWNYSKLPETFGATEDRVVSKIVRTENEFVSVMKEAQADVNRMYWIELVLEKEDAPKLLKKMGKLFAEQNK

SEQ ID NO: 107 - DNA, 1641 bp, Artificial Sequence
  Variant of branched-chain keto acid decarboxylase (kdcA) from Lactococcus lactis
atgtacaccgttggcgactatctgctggaccgtctgcatgaactgggaattgaagaaatctttggcgtgccgggcgattacaatctgcaattcctggatcaaatcattgcgcgcgaagatatgaaatggattggtaacgcgaatgaactgaatgcgagctacatggctgatggctatgcacgtacgaagaaggcggcggcgttcctgacgaccttcggtgttggtgaactgagcgcaatcaatgggttggcgggcagctatgcagagaacctgccagtcgtggaaatcgttgggagtccgacctcgaaggtgcagaacgatggcaagttcgttcatcacaccctggccgacggcgacttcaagcacttcatgaagatgcacgaaccggtcaccgctgcacgtacacatctgaccgccgagaacgcgaccacagagattgaccgcgtgctgagccaactgctgaaagaacgtaaacctgtgtacatcaacctgccggttgatgtcgccgcggcgaaagccgagaaaccagctctgagcctggagaaagaaagcagcacgttaaacaccacagaacaggtgatcctgtcgaagatcgaagaaagcctgaagaacgcccagaaaccggtcgtgatcgctgggcacgaggtgattagcttcggtctggagaagacggttacgcagtttgtgagtgaaaccaaactgccgattactaccctgaactttggcaaatcggctgtggatgaatccctgccgtccttcctgggtatctacaatggtaaactgagcgagattagcctcaagaactttgtggaaagcgcagacttcatcctgatgcttggtgtgaaactgacggatatcagtacgggcgcgtttacgcaccatctggacgagaacaagatgattagcctgaacattgatgaaggcatcatcttcaacaaagtcgtagaagacttcgatttccgcgcggttgttagcagcctgagcgagctgacaggcattgaatacgaaggtgaatacattgatagacagtacgaagagttcattccgagcagcgcaccactgtcgcaagaccgtctgtggcaagcagtagaatctctgacacagtccaatgaaaccattgtggcggaacagggcacgtcgttcttcggtgcctccaccatcttcctgaagagcaattcacgcttcatcggtcagccgctttggggcagcatcggctatacgtttccggcagcactgggatcacagattgcggataaggaaagtcgccatctgctgttcattggtgatggtagcctgcaactgaccgtgcaggagctgggcctggcgatccgtgagaaactgaacccgatttgtttcatcatcaacaacgatggctataccgtagagcgcgagattcatgggcctacacagccgtacaatgacatcccgatgtggaactatagcaaactgccggaaacctttggcgcgacggaagatcgcgtagttagcaagatcgttcgcacagagaacgagtttgtgagtgtcatgaaggaagcgcaggccgatgttaaccgcatgtattggattgaactggttctggagaaagaagatgcaccgaaactgctgaagaagatggggaagctgtttgcagaacagaacaaa

SEQ ID NO: 108 - protein, 547 aa, Artificial Sequence
  Variant of branched-chain keto acid decarboxylase (kdcA) from Lactococcus lactis
MYTVGDYLLDRLHELGIEEIFGVPGDYNLQFLDQIIAREDMKWIGNANELNASYMADGYARTKKAAAFLTTFGVGELSAINGLAGSYAENLPVVEIVGSPTSKVQNDGKFVHHTLADGDFKHFMKMHEPVTAARTHLTAENATTEIDRVLSQLLKERKPVYINLPVDVAAAKAEKPALSLEKESSTLNTTEQVILSKIEESLKNAQKPVVIAGHEVISFGLEKTVTQFVSETKLPITTLNFGKSAVDESLPSFLGIYNGKLSEISLKNFVESADFILMLGVKLTDISTGAFTHHLDENKMISLNIDEGIIFNKVVEDFDFRAVVSSLSELTGIEYEGEYIDRQYEEFIPSSAPLSQDRLWQAVESLTQSNETIVAEQGTSFFGASTIFLKSNSRFIGQPLWGSIGYTFPAALGSQIADKESRHLLFIGDGSLQLTVQELGLAIREKLNPICFIINNDGYTVEREIHGPTQPYNDIPMWNYSKLPETFGATEDRVVSKIVRTENEFVSVMKEAQADVNRMYWIELVLEKEDAPKLLKKMGKLFAEQNK

SEQ ID NO: 109 - DNA, 1641 bp, Artificial Sequence
  Variant of branched-chain keto acid decarboxylase (kdcA) from Lactococcus lactis
atgtacaccgttggcgactatctgctggaccgtctgcatgaactgggaattgaagaaatctttggcgtgccgggcgattacaatctgcaattcctggatcaaatcattgcgcgcgaagatatgaaatggattggtaacgcgaatgaactgaatgcgagctacatggctgatggctatgcacgtacgaagaaggcggcggcgttcctgacgaccttcggtgttggtgaactgagcgcaatcaatgggttggcgggcagctatgcagagaacctgccagtcgtggaaatcgttgggagtccgacctcgaaggtgcagaaccgaggcaagttcgttcatcacaccctggccgacggcgacttcaagcacttcatgaagatgcacgaaccggtcaccgctgcacgtacactgctgaccgccgagaacgcgaccacagagattgaccgcgtgctgagccaactgctgaaagaacgtaaacctgtgtacatcaacctgccggttgatgtcgccgcggcgaaagccgagaaaccagctctgagcctggagaaagaaagcccgacgttaaacaccacagaacaggtgatcctgtcgaagatcgaagaaagcctgaagaacgcccagaaaccggtcgtgatcgctgggcacgaggtgattagcttcggtctggagaagacggttacgcagtttgtgagtgaaacccacctgccgattactaccctgaactttggcaaatcggctgtggatgaatccctgccgtccttcctgggtatctacaatggtaagctgagcgagattagcctcaagaactttgtggaaagcgcagacttcatcctgatgcttggtgtgaaactgacggatatcagtacgggcgcgtttacgcaccatctggacgagaacaagatgattagcctgaacattgatgaaggcatcatcttcaacaaagtcgtagaagacttcgatttccgtgcggttgttagcagcctgaacgagctgaaaggcattgaatacgaaggtcaatacattgataagcagtacgaagagttcatcccgagcgtcgcaccactgagccaagaccgtctgtggcaagcagtagaatctctgacacagtccaatgaaaccattgtggcggaacagggcacgtcgttcttcggtgcctccaccatccctctgaagagcaattcacgcttcatcggtcagccgctttggggcagcatcggctatacgtttccggcagcactgggatcacagattgcggataaggaaagtcgccatctgctgttcattggtgatggtagcctgcaactgaccgtgcaggagctgggcctggcgatccgtgagaaactgaacccgatttgtttcatcatcaacaacgatggctataccgtagagcgcgagattcatgggcctacacagccgtacaatgacatcccgatgtggaactatagcaaactgccggaaacctttggcgcgacggaagatcgcgtagttagcaagatcgttcgcacagagaacgagtttgtgagtgtcatgaaagaagcgcaggccgatgttaaccgcatgtattggattgaactggttctggagaaagaagatgcaccgaaactgctgaagaagatggggaagctgtttgcagaacagaacaaa

SEQ ID NO: 110 - protein, 547 aa, Artificial Sequence
  Variant of branched-chain keto acid decarboxylase (kdcA) from Lactococcus lactis
MYTVGDYLLDRLHELGIEEIFGVPGDYNLQFLDQIIAREDMKWIGNANELNASYMADGYARTKKAAAFLTTFGVGELSAINGLAGSYAENLPVVEIVGSPTSKVQNRGKFVHHTLADGDFKHFMKMHEPVTAARTLLTAENATTEIDRVLSQLLKERKPVYINLPVDVAAAKAEKPALSLEKESPTLNTTEQVILSKIEESLKNAQKPVVIAGHEVISFGLEKTVTQFVSETHLPITTLNFGKSAVDESLPSFLGIYNGKLSEISLKNFVESADFILMLGVKLTDISTGAFTHHLDENKMISLNIDEGIIFNKVVEDFDFRAVVSSLNELKGIEYEGQYIDKQYEEFIPSVAPLSQDRLWQAVESLTQSNETIVAEQGTSFFGASTIPLKSNSRFIGQPLWGSIGYTFPAALGSQIADKESRHLLFIGDGSLQLTVQELGLAIREKLNPICFIINNDGYTVEREIHGPTQPYNDIPMWNYSKLPETFGATEDRVVSKIVRTENEFVSVMKEAQADVNRMYWIELVLEKEDAPKLLKKMGKLFAEQNK

SEQ ID NO: 111 - DNA, 1641 bp, Artificial Sequence
  Variant of branched-chain keto acid decarboxylase (kdcA) from Lactococcus lactis
atgtacaccgttggcgactatctgctggaccgtctgcatgaactgggaattgaagaaatctttggcgtgccgggcgattacaatctgcaattcctggatcaaatcattgcgcgcgaagatatgaaatggattggtaacgcgaatgaactgaatgcgagctacatggctgatggctatgcacgtacgaagaaggcggcggcgttcctgacgaccttcggtgttggtgaactgagcgcaatcaatgggttggcgggcagctatgcagagaacctgccagtcgtggaaatcgttgggagtccgacctcgaaggtgcagaacgatggcaagttcgttcatcacaccctggccgacggcgacttcaagcacttcatgaagatgcacgaaccggtcaccgctgcacgtacacttctgaccgccgagaacgcgaccacagagattgaccgcgtgctgagccaactgctgaaagaacgtaaacctgtgtacatcaacctgccggttgatgtcgccgcggcgaaagccgagaaaccagctctgagcctggagaaagaaagcagcacgttaaacaccacagaacaggtgatcctgtcgaagatcgaagaaagcctgaagaacgcccagaaaccggtcgtgatcgctgggcacgaggtgattagcttcggtctggagaagacggttacgcagtttgtgagtgaaaccaaactgccgattactaccctgaactttggcaaatcggctgtggatgaatccctgccgtccttcctgggtatctacaatggtaaactgagcgagattagcctcaagaactttgtggaaagcgcagacttcatcctgatgcttggtgtgaaactgacggatatcagtacgggcgcgtttacgcaccatctggacgagaacaagatgattagcctgaacattgatgaaggcatcatcttcaacaaagtcgtagaagacttcgatttccgcgcggttgttagcagcctgttggagctgaccggcattgaatacgaaggtcaatacattgataagcagtacgaagagttcattccgagcagcgcaccactgatgcaagaccgtctgtggcaagcagtagaatctctgacacagtccaatgaaaccattgtggcggaacagggcacgtcgttcttcggtgcctccaccatcttcctgaagagcaattcacgcttcatcggtcagccgctttggggcagcatcggctatacgtttccggcagcactgggatcacagattgcggataaggaaagtcgccatctgctgttcattggtgatggtagcctgcaactgaccgtgcaagagctgggcctggcgatccgtgagaaactgaacccgatttgtttcatcatcaacaacgatggctataccgtagagcgcgagattcatgggcctacacagccgtacaatgacatcccgatgtggaactatagcaaactgccggaaacctttggcgcgacggaagatcgcgtagttagcaagatcgttcgcacagagaacgagtttgtgagtgtcatgaaagaagcgcaggccgatgttaaccgcatgtattggattgaactggttctggagaaagaagatgcaccgaaactgctgaagaagatggggaagctgtttgcagaacagaacaaa

SEQ ID NO: 112 - protein, 547 aa, Artificial Sequence
  Variant of branched-chain keto acid decarboxylase (kdcA) from Lactococcus lactis
MYTVGDYLLDRLHELGIEEIFGVPGDYNLQFLDQIIAREDMKWIGNANELNASYMADGYARTKKAAAFLTTFGVGELSAINGLAGSYAENLPVVEIVGSPTSKVQNDGKFVHHTLADGDFKHFMKMHEPVTAARTLLTAENATTEIDRVLSQLLKERKPVYINLPVDVAAAKAEKPALSLEKESSTLNTTEQVILSKIEESLKNAQKPVVIAGHEVISFGLEKTVTQFVSETKLPITTLNFGKSAVDESLPSFLGIYNGKLSEISLKNFVESADFILMLGVKLTDISTGAFTHHLDENKMISLNIDEGIIFNKVVEDFDFRAVVSSLLELTGIEYEGQYIDKQYEEFIPSSAPLMQDRLWQAVESLTQSNETIVAEQGTSFFGASTIFLKSNSRFIGQPLWGSIGYTFPAALGSQIADKESRHLLFIGDGSLQLTVQELGLAIREKLNPICFIINNDGYTVEREIHGPTQPYNDIPMWNYSKLPETFGATEDRVVSKIVRTENEFVSVMKEAQADVNRMYWIELVLEKEDAPKLLKKMGKLFAEQNK

SEQ ID NO: 113 - DNA, 1641 bp, Artificial Sequence
  Variant of branched-chain keto acid decarboxylase (kdcA) from Lactococcus lactis
atgtacaccgttggcgactatctgctggaccgtctgcatgaactgggaattgaagaaatctttggcgtgccgggcgattacaatctgcaattcctggatcaaatcattgcgcgcgaagatatgaaatggattggtaacgcgaatgaactgaatgcgagctacatggctgatggctatgcacgtacgaagaaggcggcggcgttcctgacgaccttcggtgttggtgaactgagcgcaatcaatgggttggcgggcagctatgcagagaacctgccagtcgtggaaatcgttgggagtccgacctcgaaggtgcagaacgatggcaagttcgttcatcacaccctggccgacggcgacttcaagcacttcaggaagatgcacgaaccggtcaccgctgcacgtacacttctgaccgccgagaacgcgaccacagagattgaccgcgtgctgagccaactgctgaaagaacgtaaacctgtgtacatcaacctgccggttgatgtcgccgcggcgaaagccgagaaaccagctctgagcctggagaaagaaagcagcacgttaaacaccacagaacaggtgatcctgtcgaagatcgaagaaagcctgaagaacgcccagaaaccggtcgtgatcgctgggcacgaggtgattagcttcggtctggagaagacggttacgcagtttgtgagtgaaaccaaactgccgattactaccctgaactttggcaaatcggctgtggatgaatccctgccgtccttcctgggtatctacaatggtaaactgagcgagattagcctcaagaactttgtggaaagcgcagacttcatcctgatgcttggtgtgaaactgacggatatcagtacgggcgcgtttacgcaccatctggacgagaacaagatgattagcctgaacattgatgaaggcatcatcttcaacaaagtcgtagaagacttcgatttccgtgcggttgttagcagcctgtcggagctgaccggcattgaatacgaaggtcaatacattgatagacagtacgaagagttcattccgagcagcgcaccactgttgcaagaccgtctgtggcaagcagtagaatctctgacacagtccaatgaaaccattgtggcggaacagggcacgtcgttcttcggtgcctccaccatcttcctgaagagcaattcacgcttcatcggtcagccgctttggggcagcatcggctatacgtttccggcagcactgggatcacagattgcggataaggaaagtcgccatctgctgttcattggtgatggtagcctgcaactgaccgtgcaagagctgggcctggcgatccgtgagaaactgaacccgatttgtttcatcatcaacaacgatggctataccgtagagcgcgagattcatgggcctacacagccgtacaatgacatcccgatgtggaactatagcaaactgccggaaacctttggcgcgacggaagatcgcgtagttagcaagatcgttcgcacagagaacgagtttgtgagtgtcatgaaagaagcgcaggccgatgttaaccgcatgtattggattgaactggttctggagaaagaagatgcaccgaaactgctgaagaagatggggaagctgtttgcagaacagaacaaa

SEQ ID NO: 114 - protein, 547 aa, Artificial Sequence
  Variant of branched-chain keto acid decarboxylase (kdcA) from Lactococcus lactis
MYTVGDYLLDRLHELGIEEIFGVPGDYNLQFLDQIIAREDMKWIGNANELNASYMADGYARTKKAAAFLTTFGVGELSAINGLAGSYAENLPVVEIVGSPTSKVQNDGKFVHHTLADGDFKHFRKMHEPVTAARTLLTAENATTEIDRVLSQLLKERKPVYINLPVDVAAAKAEKPALSLEKESSTLNTTEQVILSKIEESLKNAQKPVVIAGHEVISFGLEKTVTQFVSETKLPITTLNFGKSAVDESLPSFLGIYNGKLSEISLKNFVESADFILMLGVKLTDISTGAFTHHLDENKMISLNIDEGIIFNKVVEDFDFRAVVSSLSELTGIEYEGQYIDRQYEEFIPSSAPLLQDRLWQAVESLTQSNETIVAEQGTSFFGASTIFLKSNSRFIGQPLWGSIGYTFPAALGSQIADKESRHLLFIGDGSLQLTVQELGLAIREKLNPICFIINNDGYTVEREIHGPTQPYNDIPMWNYSKLPETFGATEDRVVSKIVRTENEFVSVMKEAQADVNRMYWIELVLEKEDAPKLLKKMGKLFAEQNK

SEQ ID NO: 115 - DNA, 1641 bp, Artificial Sequence
  Variant of branched-chain keto acid decarboxylase (kdcA) from Lactococcus lactis
atgtacaccgttggcgactatctgctggaccgtctgcatgaactgggaattgaagaaatctttggcgtgccgggcgattacaatctgcaattcctggatcaaatcattgcgcgcgaagatatgagatggattggtaacgcgaatgaactgaatgcgagctacatggctgatggctatgcacgtacgaagaaggcggcggcgttcctgacgaccttcggtgttggtgaactgagcgcaatcaatgggttggcgggcagctatgcagagaacctgccagtcgtggaaatcgttgggagtccgacctcgaaggtgcagaacgatggcaagttcgttcatcacaccctggccgacggcgacttcaagcacttcaggaagatgcacgaaccggtcaccgctgcacgtacacttctgaccgccgagaacgcgaccacagagattgaccgcgtgctgagccaactgctgaaagaacgtaaacctgtgtacatcaacctgccggttgatgtcgccgcggcgaaagccgagaaaccagctctgagcctggagaaagaaagcagcacgttaaacaccacagaacaggtgatcctgtcgaagatcgaagaaagcctgaagtgggcccagaaaccggtcgtgatcgctgggcacgaggtgattagcttcggtctggagaagacggttacgcagtttgtgagtgaaaccaaactgccgattactaccctgaactttggcaaatcggctgtggatgaatccctgccgtccttcctgggtatctacaatggtaaactgagcgagattagcctcaagaactttgtggaaagcgcagacttcatcctgatgcttggtgtgaaactgacggatatcagtacgggcgcgtttacgcaccatctggacgagaacaagatgattagcctgaacattgatgaaggcatcatcttcaacaaagtcgtagaagacttcgatttcagcgcggttgttagcagcctgagcgagctgaaaggcattgaatacgaaggtcaatacattgataagcagtacgaagagttcattccgagcagcgcaccactgagccaagaccgtctgtggcaagcagtagaatctctgacacagtccaatgaaaccattgtggcggaacagggcacgtcgttcttcggtgcctccaccatcttcctgaagagcaattcacgcttcatcggtcagccgctttggggcagcatcggctatacgtttccggcagcactgggatcacagattgcggataaggaaagtcgccatctgctgttcattggtgatggtagcctgcaactgaccgtgcaggagctgggcctggcgatccgtgagaaactgaacccgatttgtttcatcatcaacaacgatggctataccgtagagcgcgagattcatgggcctacacagccgtacaatgacatcccgatgtggaactatagcaaactgccggaaacctttggcgcgacggaagatcgcgtagttagcaagatcgttcgcacagagaacgagtttgtgagtgtcatgaaagaagcgcaggccgatgttaaccgcatgtattggattgaactggttctggagaaagaagatgcaccgaaactgctgaagaagatggggaagctgtttgcagaacagaacaaa

SEQ ID NO: 116 - protein, 547 aa, Artificial Sequence
  Variant of branched-chain keto acid decarboxylase (kdcA) from Lactococcus lactis
MYTVGDYLLDRLHELGIEEIFGVPGDYNLQFLDQIIAREDMRWIGNANELNASYMADGYARTKKAAAFLTTFGVGELSAINGLAGSYAENLPVVEIVGSPTSKVQNDGKFVHHTLADGDFKHFRKMHEPVTAARTLLTAENATTEIDRVLSQLLKERKPVYINLPVDVAAAKAEKPALSLEKESSTLNTTEQVILSKIEESLKWAQKPVVIAGHEVISFGLEKTVTQFVSETKLPITTLNFGKSAVDESLPSFLGIYNGKLSEISLKNFVESADFILMLGVKLTDISTGAFTHHLDENKMISLNIDEGIIFNKVVEDFDFSAVVSSLSELKGIEYEGQYIDKQYEEFIPSSAPLSQDRLWQAVESLTQSNETIVAEQGTSFFGASTIFLKSNSRFIGQPLWGSIGYTFPAALGSQIADKESRHLLFIGDGSLQLTVQELGLAIREKLNPICFIINNDGYTVEREIHGPTQPYNDIPMWNYSKLPETFGATEDRVVSKIVRTENEFVSVMKEAQADVNRMYWIELVLEKEDAPKLLKKMGKLFAEQNK

SEQ ID NO: 117 - DNA, 1641 bp, Artificial Sequence
  Variant of branched-chain keto acid decarboxylase (kdcA) from Lactococcus lactis
atgtacaccgttggcgactatctgctggaccgtctgcatgaactgggaattgaagaaatctttggcgtgccgggcgattacaatctgcaattcctggatcaaatcattgcgcgcgaagatatgaaatggattggtaacgcgaatgaactgaatgcgagctacatggctgatggctatgcacgtacgaagaaggcggcggcgttcctgacgaccttcggtgttggtgaactgagcgcaatcaatgggttggcgggcagctatgcagagaacctgccagtcgtggaaatcgttgggagtccgacctcgaaggtgcagaacgatggcaagttcgttcatcacaccctggccgacggcgacttcaagcacttcatgaagatgcacgaaccggtcaccgctgcacgtacactgctgaccgccgagaacgcgaccacagagattgaccgcgtgctgagccaactgctgaaagaacgtaaacctgtgtacatcaacctgccggttgatgtcgccgcggcgaaagccgagaaaccagctctgagcctggagaaagaaagcagcacgttaaacaccacagaacaggtgatcctgtcgaagatcgaagaaagcctgaagtgggcccagaaaccggtcgtgatcgctgggcacgaggtgattagcttcggtctggagaagacggttacgcagtttgtgagtgaaaccaaactgccgattactaccctgaactttggcaaatcggctgtggatgaatccctgccgtccttcctgggtatctacaatggtaaactgagcgagattagcctcaagaactttgtggaaagcgcagacttcatcctgatgcttggtgtgaaactgacggatatcagtacgggcgcgtttacgcaccatctggacgagaacaagatgattagcctgaacattgatgaaggcatcatcttcaacaaagtcgtagaagacttcgatttcagcgcggttgttagcagcctgagcgagctgaaaggcattgaatacgaaggtgaatacattgataaacagtacgaagagttcattccgagcagcgcaccactgtcgcaagaccgtctgtggcaagcagtagaatctctgacacagtccaatgaaaccattgtggcggaacagggcacgtcgttcttcggtgcctccaccatcttcctgaagagcaattcacgcttcatcggtcagccgctttggggcagcatcggctatacgtttccggcagcactgggatcacagattgcggataaggaaagtcgccatctgctgttcattggtgatggtagcctgcaactgaccgtgcaagagctgggcctggcgatccgtgagaaactgaacccgatttgtttcatcatcaacaacgatggctataccgtagagcgcgagattcatgggcctacacagccgtacaatgacatcccgatgtggaactatagcaaactgccggaaacctttggcgcgacggaagatcgcgtagttagcaagatcgttcgcacagagaacgagtttgtgagtgtcatgaaagaagcgcaggccgatgttaaccgcatgtattggattgaactggttctggagaaagaagatgcaccgaaactgctgaagaagatggggaagctgtttgcagaacagaacaaa

SEQ ID NO: 118 - protein, 547 aa, Artificial Sequence
  Variant of branched-chain keto acid decarboxylase (kdcA) from Lactococcus lactis
MYTVGDYLLDRLHELGIEEIFGVPGDYNLQFLDQIIAREDMKWIGNANELNASYMADGYARTKKAAAFLTTFGVGELSAINGLAGSYAENLPVVEIVGSPTSKVQNDGKFVHHTLADGDFKHFMKMHEPVTAARTLLTAENATTEIDRVLSQLLKERKPVYINLPVDVAAAKAEKPALSLEKESSTLNTTEQVILSKIEESLKWAQKPVVIAGHEVISFGLEKTVTQFVSETKLPITTLNFGKSAVDESLPSFLGIYNGKLSEISLKNFVESADFILMLGVKLTDISTGAFTHHLDENKMISLNIDEGIIFNKVVEDFDFSAVVSSLSELKGIEYEGEYIDKQYEEFIPSSAPLSQDRLWQAVESLTQSNETIVAEQGTSFFGASTIFLKSNSRFIGQPLWGSIGYTFPAALGSQIADKESRHLLFIGDGSLQLTVQELGLAIREKLNPICFIINNDGYTVEREIHGPTQPYNDIPMWNYSKLPETFGATEDRVVSKIVRTENEFVSVMKEAQADVNRMYWIELVLEKEDAPKLLKKMGKLFAEQNK

SEQ ID NO: 119 - DNA, 1641 bp, Artificial Sequence
  Variant of branched-chain keto acid decarboxylase (kdcA) from Lactococcus lactis
atgtacaccgttggcgactatctgctggaccgtctgcatgaactgggaattgaagaaatctttggcgtgccgggcgattacaatctgcaattcctggatcaaatcattgcgcgcgaagatatgaaatggattggtaacgcgaatgaactgaatgcgagctacatggctgatggctatgcacgtacgaagaaggcggcggcgttcctgacgaccttcggtgttggtgaactgagcgcaatcaatgggttggcgggcagctatgcagagaacctgccagtcgtggaaatcgttgggagtccgacctcgaaggtgcagaaccgaggcaagttcgttcatcacaccctggccgacggcgacttcaagcacttcatgaagatgcacgaaccggtcaccgctgcacgtacactgctgaccgccgagaacgcgaccacagagattgaccgcgtgctgagccaactgctgaaagaacgtaaacctgtgtacatcaacctgccggttgatgtcgccgcggcgaaagccgagaaaccagctctgagcctggagaaatacagctcgacgttaaacaccacagaacaggtgatcctgtcgaagatcgaagaaagcctgaagaacgcccagaaaccggtcgtgatcgctgggcacgaggtgattagcttcggtctggagaagacggttacgcagtttgtgagtgaaaccaagctgccgattactaccctgaactttggcaaatcggctgtggatgaatccctgccgtccttcctgggtatctacaatggttcactgagcgagattagcctcaagaactttgtggaaagcgcagacttcatcctgatgcttggtgtgaaactgacggatatcagtacgggcgcgtttacgcaccatctggacgagaacaagatgattagcctgaacattgatgaaggcatcatcttcaacaaagtcgtagaagacttcgatttccgtgcggttgttagcagcctgaacgagctgaaaggcattgaatacgaaggtcaatacattgataagcagtacgaagagttcgacccgagcgtcgcaccactgagccaagaccgtctgtggcaagcagtagaatctctgacacagtccaatgaaaccattgtggcggaacagggcacgtcgttcttcggtgcctccaccatcttcctgaagagcaattcacgcttcatcggtcagccgctttggggcagcatcggctatacgtttccggcagcactgggatcacagattgcggataaggaaagtcgccatctgctgttcattggtgatggtagcctgcaactgaccgtgcaggagctgggcctggcgatccgtgagaaactgaacccgatttgtttcatcatcaacaacgatggctataccgtagagcgcgagattcatgggcctacacagccgtacaatgacatcccgatgtggaactatagcaaactgccggaaacctttggcgcgacggaagatcgcgtagttagcaagatcgttcgcacagagaacgagtttgtgagtgtcatgaaagaagcgcaggccgatgttaaccgcatgtattggattgaactggttctggagaaagaagatgcaccgaaactgctgaagaagatggggaagctgtttgcagaacagaacaaa

SEQ ID NO: 120 - protein, 547 aa, Artificial Sequence
  Variant of branched-chain keto acid decarboxylase (kdcA) from Lactococcus lactis
MYTVGDYLLDRLHELGIEEIFGVPGDYNLQFLDQIIAREDMKWIGNANELNASYMADGYARTKKAAAFLTTFGVGELSAINGLAGSYAENLPVVEIVGSPTSKVQNRGKFVHHTLADGDFKHFMKMHEPVTAARTLLTAENATTEIDRVLSQLLKERKPVYINLPVDVAAAKAEKPALSLEKYSSTLNTTEQVILSKIEESLKNAQKPVVIAGHEVISFGLEKTVTQFVSETKLPITTLNFGKSAVDESLPSFLGIYNGSLSEISLKNFVESADFILMLGVKLTDISTGAFTHHLDENKMISLNIDEGIIFNKVVEDFDFRAVVSSLNELKGIEYEGQYIDKQYEEFDPSVAPLSQDRLWQAVESLTQSNETIVAEQGTSFFGASTIFLKSNSRFIGQPLWGSIGYTFPAALGSQIADKESRHLLFIGDGSLQLTVQELGLAIREKLNPICFIINNDGYTVEREIHGPTQPYNDIPMWNYSKLPETFGATEDRVVSKIVRTENEFVSVMKEAQADVNRMYWIELVLEKEDAPKLLKKMGKLFAEQNK

SEQ ID NO: 121 - DNA, 1641 bp, Artificial Sequence
  Variant of branched-chain keto acid decarboxylase (kdcA) from Lactococcus lactis
atgtacaccgttggcgactatctgctggaccgtctgcatgaactgggaattgaagaaatctttggcgtgccgggcgattacaatctgcaattcctggatcaaatcattgcgcgcgaagatatgaaatggattggtaacgcgaatgaactgaatgcgagctacatggctgatggctatgcacgtacgaagaaggcggcggcgttcctgacgaccttcggtgttggtgaactgagcgcaatcaatgggttggcgggcagctatgcagagaacctgccagtcgtggaaatcgttgggagtccgacctcgaaggtgcagaaccgaggcaagttcgttcatcacaccctggccgacggcgacttcaagcacttcatgaagatgcacgaaccggtcaccgctgcacgtacactgctgaccgccgagaacgcgaccacagagattgaccgcgtgctgagccaactgctgaaagaacgtaaacctgtgtacatcaacctgccggttgatgtcgccgcggcgaaagccgagaaaccagctctgagcctggagaaatacagctcgacgttaaacaccacagaacaggtgatcctgtcgaagatcgaagaaagcctgaagaacgcccagaaaccggtcgtgatcgctgggcacgaggtgattagcttcggtctggagaagacggttacgcagtttgtgagtgaaaccaggctgccgattactaccctgaactttggcaaatcggctgtggatgaatccctgccgtccttcctgggtatctacaatggttcactgagcgagattagcctcaagaactttgtggaaagcgcagacttcatcctgatgcttggtgtgaaactgacggatatcagtacgggcgcgtttacgcaccatctggacgagaacaagatgattagcctgaacattgatgaaggcatcatcttcaacaaagtcgtagaagacttcgatttccgtgcggttgttagcagcctgaacgagctgaaaggcattgaatacgaaggtcaatacattgataagcagtacgaagagttcgacccgagcgtcgcaccactgagccaagaccgtctgtggcaagcagtagaatctctgacacagtccaatgaaaccattgtggcggaacagggcacgtcgttcttcggtgcctccaccatccctctgaagagcaattcacgcttcatcggtcagccgctttggggcagcatcggctatacgtttccggcagcactgggatcacagattgcggataaggaaagtcgccatctgctgttcattggtgatggtagcctgcaactgaccgtgcaggagctgggcctggcgatccgtgagaaactgaacccgatttgtttcatcatcaacaacgatggctataccgtagagcgcgagattcatgggcctacacagccgtacaatgacatcccgatgtggaactatagcaaactgccggaaacctttggcgcgacggaagatcgcgtagttagcaagatcgttcgcacagagaacgagtttgtgagtgtcatgaaagaagcgcaggccgatgttaaccgcatgtattggattgaactggttctggagaaagaagatgcaccgaaactgctgaagaagatggggaagctgtttgcagaacagaacaaa

SEQ ID NO: 122 - protein, 547 aa, Artificial Sequence
  Variant of branched-chain keto acid decarboxylase (kdcA) from Lactococcus lactis
MYTVGDYLLDRLHELGIEEIFGVPGDYNLQFLDQIIAREDMKWIGNANELNASYMADGYARTKKAAAFLTTFGVGELSAINGLAGSYAENLPVVEIVGSPTSKVQNRGKFVHHTLADGDFKHFMKMHEPVTAARTLLTAENATTEIDRVLSQLLKERKPVYINLPVDVAAAKAEKPALSLEKYSSTLNTTEQVILSKIEESLKNAQKPVVIAGHEVISFGLEKTVTQFVSETRLPITTLNFGKSAVDESLPSFLGIYNGSLSEISLKNFVESADFILMLGVKLTDISTGAFTHHLDENKMISLNIDEGIIFNKVVEDFDFRAVVSSLNELKGIEYEGQYIDKQYEEFDPSVAPLSQDRLWQAVESLTQSNETIVAEQGTSFFGASTIPLKSNSRFIGQPLWGSIGYTFPAALGSQIADKESRHLLFIGDGSLQLTVQELGLAIREKLNPICFIINNDGYTVEREIHGPTQPYNDIPMWNYSKLPETFGATEDRVVSKIVRTENEFVSVMKEAQADVNRMYWIELVLEKEDAPKLLKKMGKLFAEQNK

SEQ ID NO: 123 - DNA, 1641 bp, Artificial Sequence
  Variant of branched-chain keto acid decarboxylase (kdcA) from Lactococcus lactis
atgtacaccgttggcgactatctgctggaccgtctgcatgaactgggaattgaagaaatctttggcgtgccgggcgattacaatctgcaattcctggatcaaatcattgcgcgcgaagatatgaaatggattggtaacgcgaatgaactgaatgcgagctacatggctgatggctatgcacgtacgaagaaggcggcggcgttcctgacgaccttcggtgttggtgaactgagcgcaatcaatgggttggcgggcagctatgcagagaacctgccagtcgtggaaatcgttgggagtccgacctcgaaggtgcagaacgacggcaagttcgttcatcacaccctggccgacggcgacttcaagcacttctggaagatgcacgaaccggtcaccgctgcacgtacactgctgaccgccgagaacgcgaccacagagattgaccgcgtgctgagccaactgctgaaagaacgtaaacctgtgtacatcaacctgccggttgatgtcgccgcggcgaaagccgagaaaccagctctgagcctggagaaagaaagcagcacgttaaacaccacagaacaggtgatcctgtcgaagatcgaagaaagcctgaagaacgcccagaaaccggtcgtgatcgctgggcacgaggtgattagcttcggtctggagaagacggttacgcagtttgtgagtgaaaccaaactgccgattactaccctgaactttggcaaatcggctgtggatgaatccctgccgtccttcctgggtatctacaatggtaaactgagcgagattagcctcaagaactttgtggaaagcgcagacttcatcctgatgcttggtgtgaaactgacggatatcagtacgggcgcgtttacgcaccatctggacgagaacaagatgattagcctgaacattgatgaaggcatcatcttcaacaaagtcgtagaagacttcgatttccgtgcggttgtttttagcctgagcgagctgcttggcattgaatacgaaggtcaatacattgataagcagtacgaagagttcattccgagcagcgcaccactgagccaagaccgtctgtggcaagcagtagaatctctgacacagtccaatgaaaccattgtggcggaacagggcacgtcgttcttcggtgcctccaccatcttcctgaagagcaattcacgcttcatcggtcagccgctttggggcagcatcggctatacgtttccggcagcactgggatcacagattgcggataaggaaagtcgccatctgctgttcattggtgatggtagcctgcaactgaccgtgcaggagctgggcctggcgatccgtgagaaactgaacccgatttgtttcatcatcaacaacgatggctataccgtagagcgcgagattcatgggcctacacagccgtacaatgacatcccgatgtggaactatagcaaactgccggaaacctttggcgcgacggaagatcgcgtagttagcaagatcgttcgcacagagaacgagtttgtgagtgtcatgaaagaagcgcaggccgatgttaaccgcatgtattggattgaactggttctggagaaagaagatgcaccgaaactgctgaagaagatggggaagctgtttgcagaacagaacaaa

SEQ ID NO: 124 - protein, 547 aa, Artificial Sequence
  Variant of branched-chain keto acid decarboxylase (kdcA) from Lactococcus lactis
MYTVGDYLLDRLHELGIEEIFGVPGDYNLQFLDQIIAREDMKWIGNANELNASYMADGYARTKKAAAFLTTFGVGELSAINGLAGSYAENLPVVEIVGSPTSKVQNDGKFVHHTLADGDFKHFWKMHEPVTAARTLLTAENATTEIDRVLSQLLKERKPVYINLPVDVAAAKAEKPALSLEKESSTLNTTEQVILSKIEESLKNAQKPVVIAGHEVISFGLEKTVTQFVSETKLPITTLNFGKSAVDESLPSFLGIYNGKLSEISLKNFVESADFILMLGVKLTDISTGAFTHHLDENKMISLNIDEGIIFNKVVEDFDFRAVVFSLSELLGIEYEGQYIDKQYEEFIPSSAPLSQDRLWQAVESLTQSNETIVAEQGTSFFGASTIFLKSNSRFIGQPLWGSIGYTFPAALGSQIADKESRHLLFIGDGSLQLTVQELGLAIREKLNPICFIINNDGYTVEREIHGPTQPYNDIPMWNYSKLPETFGATEDRVVSKIVRTENEFVSVMKEAQADVNRMYWIELVLEKEDAPKLLKKMGKLFAEQNK

SEQ ID NO: 125 - DNA, 1641 bp, Artificial Sequence
  Variant of branched-chain keto acid decarboxylase (kdcA) from Lactococcus lactis
atgtacaccgttggcgactatctgctggaccgtctgcatgaactgggaattgaagaaatctttggcgtgccgggcgattacaatctgcaattcctggatcaaatcattgcgcgcgaagatatgaaatggattggtaacgcgaatgaactgaatgcgagctacatggctgatggctatgcacgtacgaagaaggcggcggcgttcctgacgaccttcggtgttggtgaactgagcgcaatcaatgggttggcgggcagctatgcagagaacctgccagtcgtggaaatcgttgggagtccgacctcgaaggtgcagaacgatggcaagttcgttcatcacaccctggccgacggcgacttcaagcacttcaggaagatgcacgaaccggtcaccgctgcacgtacacatctgaccgccgagaacgcgaccacagagattgaccgcgtgctgagccaactgctgaaagaacgtaaacctgtgtacatcaacctgccggttgatgtcgccgcggcgaaagccgagaaaccagctctgagcctggagaaagaaagcagcacgttaaacaccacagaacaggtgatcctgtcgaagatcgaagaaagcctgaagaacgcccagaaaccggtcgtgatcgctgggcacgaggtgattagcttcggtctggagaagacggttacgcagtttgtgagtgaaaccaaactgccgattactaccctgaactttggcaaatcggctgtggatgaatccctgccgtccttcctgggtatctacaatggtaaactgagcgagattagcctcaagaactttgtggaaagcgcagacttcatcctgatgcttggtgtgaaactgacggatatcagtacgggcgcgtttacgcaccatctggacgagaacaagatgattagcctgaacattgatgaaggcatcatcttcaacaaagtcgtagaagacttcgatttcagcgcggttgttagcagcctgagcgagctgaaaggcattgaatacgaaggtcaatacattgataaacagtacgaagagttcattccgagcagcgcaccactgttgcaagaccgtctgtggcaagcagtagaatctctgacacagtccaatgaaaccattgtggcggaacagggcacgtcgttcttcggtgcctccaccatcttcctgaagagcaattcacgcttcatcggtcagccgctttggggcagcatcggctatacgtttccggcagcactgggatcacagattgcggataaggaaagtcgccatctgctgttcattggtgatggtagcctgcaactgaccgtgcaggagctgggcctggcgatccgtgagaaactgaacccgatttgtttcatcatcaacaacgatggctataccgtagagcgcgagattcatgggcctacacagccgtacaatgacatcccgatgtggaactatagcaaactgccggaaacctttggcgcgacggaagatcgcgtagttagcaagatcgttcgcacagagaacgagtttgtgagtgtcatgaaagaagcgcaggccgatgttaaccgcatgtattggattgaactggttctggagaaagaagatgcaccgaaactgctgaagaagatggggaagctgtttgcagaacagaacaaa

SEQ ID NO: 126 - protein, 547 aa, Artificial Sequence
  Variant of branched-chain keto acid decarboxylase (kdcA) from Lactococcus lactis
MYTVGDYLLDRLHELGIEEIFGVPGDYNLQFLDQIIAREDMKWIGNANELNASYMADGYARTKKAAAFLTTFGVGELSAINGLAGSYAENLPVVEIVGSPTSKVQNDGKFVHHTLADGDFKHFRKMHEPVTAARTHLTAENATTEIDRVLSQLLKERKPVYINLPVDVAAAKAEKPALSLEKESSTLNTTEQVILSKIEESLKNAQKPVVIAGHEVISFGLEKTVTQFVSETKLPITTLNFGKSAVDESLPSFLGIYNGKLSEISLKNFVESADFILMLGVKLTDISTGAFTHHLDENKMISLNIDEGIIFNKVVEDFDFSAVVSSLSELKGIEYEGQYIDKQYEEFIPSSAPLLQDRLWQAVESLTQSNETIVAEQGTSFFGASTIFLKSNSRFIGQPLWGSIGYTFPAALGSQIADKESRHLLFIGDGSLQLTVQELGLAIREKLNPICFIINNDGYTVEREIHGPTQPYNDIPMWNYSKLPETFGATEDRVVSKIVRTENEFVSVMKEAQADVNRMYWIELVLEKEDAPKLLKKMGKLFAEQNK

SEQ ID NO: 127 - DNA, 1641 bp, Artificial Sequence
  Variant of branched-chain keto acid decarboxylase (kdcA) from Lactococcus lactis
atgtacaccgttggcgactatctgctggaccgtctgcatgaactgggaattgaagaaatctttggcgtgccgggcgattacaatctgcaattcctggatcaaatcattgcgcgcgaagatatgagatggattggtaacgcgaatgaactgaatgcgagctacatggctgatggctatgcacgtacgaagaaggcggcggcgttcctgacgaccttcggtgttggtgaactgagcgcaatcaatgggttggcgggcagctatgcagagaacctgccagtcgtggaaatcgttgggagtccgacctcgaaggtgcagaacgatggcaagttcgttcatcacaccctggccgacggcgacttcaagcacttcatgaagatgcacgaaccggtcaccgctgcacgtacacttctgaccgccgagaacgcgaccacagagattgaccgcgtgctgagccaactgctgaaagaacgtaaacctgtgtacatcaacctgccggttgatgtcgccgcggcgaaagccgagaaaccagctctgagcctggagaaagaaagcagcacgttaaacaccacagaacaggtgatcctgtcgaagatcgaagaaagcctgaagaacgcccagaaaccggtcgtgatcgctgggcacgaggtgattagcttcggtctggagaagacggttacgcagtttgtgagtgaaaccaaactgccgattactaccctgaactttggcaaatcggctgtggatgaatccctgccgtccttcctgggtatctacaatggtaaactgagcgagattagcctcaagaactttgtggaaagcgcagacttcatcctgatgcttggtgtgaaactgacggatatcagtacgggcgcgtttacgcaccatctggacgagaacaagatgattagcctgaacattgatgaaggcatcatcttcaacaaagtcgtagaagacttcgatttccgcgcggttgttagcagcctgagcgagctgaaaggcattgaatacgaaggtcaatacattgataagcagtacgaagagttcattccgagcagcgcaccactgatgcaagaccgtctgtggcaagcagtagaatctctgacacagtccaatgaaaccattgtggcggaacagggcacgtcgttcttcggtgcctccaccatcttcctgaagagcaattcacgcttcatcggtcagccgctttggggcagcatcggctatacgtttccggcagcactgggatcacagattgcggataaggaaagtcgccatctgctgttcattggtgatggtagcctgcaactgaccgtgcaggagctgggcctggcgatccgtgagaaactgaacccgatttgtttcatcatcaacaacgatggctataccgtagagcgcgagattcatgggcctacacagccgtacaatgacatcccgatgtggaactatagcaaactgccggaaacctttggcgcgacggaagatcgcgtagttagcaagatcgttcgcacagagaacgagtttgtgagtgtcatgttcgaagcgcaggccgatgttaaccgcatgtattggattgaactggttctggagaaagaagatgcaccgaaactgctgaagaagatggggaagctgtttgcagaacagaacaaa

SEQ ID NO: 128 - protein, 547 aa, Artificial Sequence
  Variant of branched-chain keto acid decarboxylase (kdcA) from Lactococcus lactis
MYTVGDYLLDRLHELGIEEIFGVPGDYNLQFLDQIIAREDMRWIGNANELNASYMADGYARTKKAAAFLTTFGVGELSAINGLAGSYAENLPVVEIVGSPTSKVQNDGKFVHHTLADGDFKHFMKMHEPVTAARTLLTAENATTEIDRVLSQLLKERKPVYINLPVDVAAAKAEKPALSLEKESSTLNTTEQVILSKIEESLKNAQKPVVIAGHEVISFGLEKTVTQFVSETKLPITTLNFGKSAVDESLPSFLGIYNGKLSEISLKNFVESADFILMLGVKLTDISTGAFTHHLDENKMISLNIDEGIIFNKVVEDFDFRAVVSSLSELKGIEYEGQYIDKQYEEFIPSSAPLMQDRLWQAVESLTQSNETIVAEQGTSFFGASTIFLKSNSRFIGQPLWGSIGYTFPAALGSQIADKESRHLLFIGDGSLQLTVQELGLAIREKLNPICFIINNDGYTVEREIHGPTQPYNDIPMWNYSKLPETFGATEDRVVSKIVRTENEFVSVMFEAQADVNRMYWIELVLEKEDAPKLLKKMGKLFAEQNK

SEQ ID NO: 129 - DNA, 1641 bp, Artificial Sequence
  Variant of branched-chain keto acid decarboxylase (kdcA) from Lactococcus lactis
atgtacaccgttggcgactatctgctggaccgtctgcatgaactgggaattgaagaaatctttggcgtgccgggcgattacaatctgcaattcctggatcaaatcattgcgcgcgaagatatgagatggattggtaacgcgaatgaactgaatgcgagctacatggctgatggctatgcacgtacgaagaaggcggcggcgttcctgacgaccttcggtgttggtgaactgagcgcaatcaatgggttggcgggcagctatgcagagaacctgccagtcgtggaaatcgttgggagtccgacctcgaaggtgcagaacgatggcaagttcgttcatcacaccctggccgacggcgacttcaagcacttcaggaagatgcacgaaccggtcaccgctgcacgtacacatctgaccgccgagaacgcgaccacagagattgaccgcgtgctgagccaactgctgaaagaacgtaaacctgtgtacatcaacctgccggttgatgtcgccgcggcgaaagccgagaaaccagctctgagcctggagaaagaaagcagcacgttaaacaccacagaacaggtgatcctgtcgaagatcgaagaaagcctgaagtgggcccagaaaccggtcgtgatcgctgggcacgaggtgattagcttcggtctggagaagacggttacgcagtttgtgagtgaaaccaaactgccgattactaccctgaactttggcaaatcggctgtggatgaatccctgccgtccttcctgggtatctacaatggtaaactgagcgagattagcctcaagaactttgtggaaagcgcagacttcatcctgatgcttggtgtgaaactgacggatatcagtacgggcgcgtttacgcaccatctggacgagaacaagatgattagcctgaacattgatgaaggcatcatcttcaacaaagtcgtagaagacttcgatttccgcgcggttgttagcagcctgagcgagctgaaaggcattgaatacgaaggtcaatacattgataagcagtacgaagagttcattccgagcagcgcaccactgagccaagaccgtctgtggcaagcagtagaatctctgacacagtccaatgaaaccattgtggcggaacagggcacgtcgttcttcggtgcctccaccatcttcctgaagagcaattcacgcttcatcggtcagccgctttggggcagcatcggctatacgtttccggcagcactgggatcacagattgcggataaggaaagtcgccatctgctgttcattggtgatggtagcctgcaactgaccgtgagcgagctgggcctggcgatccgtgagaaactgaacccgatttgtttcatcatcaacaacgatggctataccgtagagcgcgagattcatgggcctacacagccgtacaatgacatcccgatgtggaactatagcaaactgccggaaacctttggcgcgacggaagatcgcgtagttagcaagatcgttcgcacagagaacgagtttgtgagtgtcatgaaggaagcgcaggccgatgttaaccgcatgtattggattgaactggttctggagaaagaagatgcaccgaaactgctgaagaagatggggaagctgtttgcagaacagaacaaa

SEQ ID NO: 130 - protein, 547 aa, Artificial Sequence
  Variant of branched-chain keto acid decarboxylase (kdcA) from Lactococcus lactis
MYTVGDYLLDRLHELGIEEIFGVPGDYNLQFLDQIIAREDMRWIGNANELNASYMADGYARTKKAAAFLTTFGVGELSAINGLAGSYAENLPVVEIVGSPTSKVQNDGKFVHHTLADGDFKHFRKMHEPVTAARTHLTAENATTEIDRVLSQLLKERKPVYINLPVDVAAAKAEKPALSLEKESSTLNTTEQVILSKIEESLKWAQKPVVIAGHEVISFGLEKTVTQFVSETKLPITTLNFGKSAVDESLPSFLGIYNGKLSEISLKNFVESADFILMLGVKLTDISTGAFTHHLDENKMISLNIDEGIIFNKVVEDFDFRAVVSSLSELKGIEYEGQYIDKQYEEFIPSSAPLSQDRLWQAVESLTQSNETIVAEQGTSFFGASTIFLKSNSRFIGQPLWGSIGYTFPAALGSQIADKESRHLLFIGDGSLQLTVSELGLAIREKLNPICFIINNDGYTVEREIHGPTQPYNDIPMWNYSKLPETFGATEDRVVSKIVRTENEFVSVMKEAQADVNRMYWIELVLEKEDAPKLLKKMGKLFAEQNK

SEQ ID NO: 131 - DNA, 1641 bp, Artificial Sequence
  Variant of branched-chain keto acid decarboxylase (kdcA) from Lactococcus lactis
atgtacaccgttggcgactatctgctggaccgtctgcatgaactgggaattgaagaaatctttggcgtgccgggcgattacaatctgcaattcctggatcaaatcattgcgcgcgaagatatgagatggattggtaacgcgaatgaactgaatgcgagctacatggctgatggctatgcacgtacgaagaaggcggcggcgttcctgacgaccttcggtgttggtgaactgagcgcaatcaatgggttggcgggcagctatgcagagaacctgccagtcgtggaaatcgttgggagtccgacctcgaaggtgcagaacgatggcaagttcgttcatcacaccctggccgacggcgacttcaagcacttcaggaagatgcacgaaccggtcaccgctgcacgtacactgctgaccgccgagaacgcgaccacagagattgaccgcgtgctgagccaactgctgaaagaacgtaaacctgtgtacatcaacctgccggttgatgtcgccgcggcgaaagccgagaaaccagctctgagcctggagaaagaaagcagcacgttaaacaccacagaacaggtgatcctgtcgaagatcgaagaaagcctgaagtgggcccagaaaccggtcgtgatcgctgggcacgaggtgattagcttcggtctggagaagacggttacgcagtttgtgagtgaaaccaaactgccgattactaccctgaactttggcaaatcggctgtggatgaatccctgccgtccttcctgggtatctacaatggtaaactgagcgagattagcctcaagaactttgtggaaagcgcagacttcatcctgatgcttggtgtgaaactgacggatatcagtacgggcgcgtttacgcaccatctggacgagaacaagatgattagcctgaacattgatgaaggcatcatcttcaacaaagtcgtagaagacttcgatttccgcgcggttgttagcagcctgagcgagctgaaaggcattgaatacgaaggtcaatacattgataagcagtacgaagagttcattccgagcagcgcaccactgtcgcaagaccgtctgtggcaagcagtagaatctctaacacagtccaatgaaaccattgtggcggaacagggcacgtcgttcttcggtgcctccaccatcttcctgaagagcaattcacgcttcatcggtcagccgctttggggcagcatcggctatacgtttccggcagcactgggatcacagattgcggataaggaaagtcgccatctgctgttcattggtgatggtagcctgcaactgaccgtgcaagagctgggcctggcgatccgtgagaaactgaacccgatttgtttcatcatcaacaacgatggctataccgtagagcgcgagattcatgggcctacacagccgtacaatgacatcccgatgtggaactatagcaaactgccggaaacctttggcgcgacggaagatcgcgtagttagcaagatcgttcgcacagagaacgagtttgtgagtgtcatgaaggaagcgcaggccgatgttaaccgcatgtattggattgaactggttctggagaaagaagatgcaccgaaactgctgaagaagatggggaagctgtttgcagaacagaacaaa

SEQ ID NO: 132 - protein, 547 aa, Artificial Sequence
  Variant of branched-chain keto acid decarboxylase (kdcA) from Lactococcus lactis
MYTVGDYLLDRLHELGIEEIFGVPGDYNLQFLDQIIAREDMRWIGNANELNASYMADGYARTKKAAAFLTTFGVGELSAINGLAGSYAENLPVVEIVGSPTSKVQNDGKFVHHTLADGDFKHFRKMHEPVTAARTLLTAENATTEIDRVLSQLLKERKPVYINLPVDVAAAKAEKPALSLEKESSTLNTTEQVILSKIEESLKWAQKPVVIAGHEVISFGLEKTVTQFVSETKLPITTLNFGKSAVDESLPSFLGIYNGKLSEISLKNFVESADFILMLGVKLTDISTGAFTHHLDENKMISLNIDEGIIFNKVVEDFDFRAVVSSLSELKGIEYEGQYIDKQYEEFIPSSAPLSQDRLWQAVESLTQSNETIVAEQGTSFFGASTIFLKSNSRFIGQPLWGSIGYTFPAALGSQIADKESRHLLFIGDGSLQLTVQELGLAIREKLNPICFIINNDGYTVEREIHGPTQPYNDIPMWNYSKLPETFGATEDRVVSKIVRTENEFVSVMKEAQADVNRMYWIELVLEKEDAPKLLKKMGKLFAEQNK

SEQ ID NO: 133 - DNA, 1641 bp, Artificial Sequence
  Variant of branched-chain keto acid decarboxylase (kdcA) from Lactococcus lactis
atgtacaccgttggcgactatctgctggaccgtctgcatgaactgggaattgaagaaatctttggcgtgccgggcgattacaatctgcaattcctggatcaaatcattgcgcgcgaagatatgaaatggattggtaacgcgaatgaactgaatgcgagctacatggctgatggctatgcacgtacgaagaaggcggcggcgttcctgacgaccttcggtgttggtgaactgagcgcaatcaatgggttggcgggcagctatgcagagaacctgccagtcgtggaaatcgttgggagtccgacctcgaaggtgcagaacgatggcaagttcgttcatcacaccctggccgacggcgacttcaagcacttcatgaagatgcacgaaccggtcaccgctgcacgtacactgctgaccgccgagaacgcgaccacagagattgaccgcgtgctgagccaactgctgaaagaacgtaaacctgtgtacatcaacctgccggttgatgtcgccgcggcgaaagccgagaaaccagctctgagcctggagaaagaaagcagcacgttaaacaccacagaacaggtgatcctgtcgaagatcgaagaaagcctgaagaacgcccagaaaccggtcgtgatcgctgggcacgaggtgattagcttcggtctggagaagacggttacgcagtttgtgagtgaaaccaaactgccgattactaccctgaactttggcaaatcggctgtggatgaatccctgccgtccttcctgggtatctacaatggtaaactgagcgagattagcctcaagaactttgtggaaagcgcagacttcatcctgatgcttggtgtgaaactgacggatatcagtacgggcgcgtttacgcaccatctggacgagaacaagatgattagcctgaacattgatgaaggcatcatcttcaacaaagtcgtagaagacttcgatttcagcgcggttgttagcagcctgttggagctgacaggcattgaatacgaaggtcaatacattgataagcagtacgaagagttcattccgagcagcgcaccactgtcgcaagaccgtctgtggcaagcagtagaatctctgacacagtccaatgaaaccattgtggcggaacagggcacgtcgttcttcggtgcctccaccatcttcctgaagagcaattcacgcttcatcggtcagccgctttggggcagcatcggctatacgtttccggcagcactgggatcacagattgcggataaggaaagtcgccatctgctgttcattggtgatggtagcctgcaactgaccgtgcaagagctgggcctggcgatccgtgagaaactgaacccgatttgtttcatcatcaacaacgatggctataccgtagagcgcgagattcatgggcctacacagccgtacaatgacatcccgatgtggaactatagcaaactgccggaaacctttggcgcgacggaagatcgcgtagttagcaagatcgttcgcacagagaacgagtttgtgagtgtcatgaaggaagcgcaggccgatgttaaccgcatgtattggattgaactggttctggagaaagaagatgcaccgaaactgctgaagaagatggggaagctgtttgcagaacagaacaaa

SEQ ID NO: 134 - protein, 547 aa, Artificial Sequence
  Variant of branched-chain keto acid decarboxylase (kdcA) from Lactococcus lactis
MYTVGDYLLDRLHELGIEEIFGVPGDYNLQFLDQIIAREDMKWIGNANELNASYMADGYARTKKAAAFLTTFGVGELSAINGLAGSYAENLPVVEIVGSPTSKVQNDGKFVHHTLADGDFKHFMKMHEPVTAARTLLTAENATTEIDRVLSQLLKERKPVYINLPVDVAAAKAEKPALSLEKESSTLNTTEQVILSKIEESLKNAQKPVVIAGHEVISFGLEKTVTQFVSETKLPITTLNFGKSAVDESLPSFLGIYNGKLSEISLKNFVESADFILMLGVKLTDISTGAFTHHLDENKMISLNIDEGIIFNKVVEDFDFSAVVSSLLELTGIEYEGQYIDKQYEEFIPSSAPLSQDRLWQAVESLTQSNETIVAEQGTSFFGASTIFLKSNSRFIGQPLWGSIGYTFPAALGSQIADKESRHLLFIGDGSLQLTVQELGLAIREKLNPICFIINNDGYTVEREIHGPTQPYNDIPMWNYSKLPETFGATEDRVVSKIVRTENEFVSVMKEAQADVNRMYWIELVLEKEDAPKLLKKMGKLFAEQNK

SEQ ID NO: 135 - DNA, 1641 bp, Artificial Sequence
  Variant of branched-chain keto acid decarboxylase (kdcA) from Lactococcus lactis
atgtacaccgttggcgactatctgctggaccgtctgcatgaactgggaattgaagaaatctttggcgtgccgggcgattacaatctgcaattcctggatcaaatcattgcgcgcgaagatatgaaatggattggtaacgcgaatgaactgaatgcgagctacatggctgatggctatgcacgtacgaagaaggcggcggcgttcctgacgaccttcggtgttggtgaactgagcgcaatcaatgggttggcgggcagctatgcagagaacctgccagtcgtggaaatcgttgggagtccgacctcgaaggtgcagaacgacggcaagttcgttcatcacaccctggccgacggcgacttcaagcacttcatgaagatgcacgaaccggtcaccgctgcacgtacactgctgaccgccgagaacgcgaccacagagattgaccgcgtgctgagccaactgctgaaagaacgtaaacctgtgtacatcaacctgccggttgatgtcgccgcggcgaaagccgagaaaccagctctgagcctggagaaatacagctcgacgttaaacaccacagaacaggtgatcctgtcgaagatcgaagaaagcctgaagaacgcccagaaaccggtcgtgatcgctgggcacgaggtgattagcttcggtctggagaagacggttacgcagtttgtgagtgaaacccacctgccgattactaccctgaactttggcaaatcggctgtggatgaatccctgccgtccttcctgggtatctacaatggtaagctgagcgagattagcctcaagaactttgtggaaagcgcagacttcatcctgatgcttggtgtgaaactgacggatatcagtacgggcgcgtttacgcaccatctggacgagaacaagatgattagcctgaacattgatgaaggcatcatcttcaacaaagtcgtagaagacttcgatttccgtgcggttgttagcagcctgagcgagctgaaaggcattgaatacgaaggtcaatacattgataagcagtacgaagagttcatcccgagcgtcgcaccactgagccaagaccgtctgtggcaagcagtagaatctctgacacagtccaatgaaaccattgtggcggaacagggcacgtcgttcttcggtgcctccaccatccctctgaagagcaattcacgcttcatcggtcagccgctttggggcagcatcggctatacgtttccggcagcactgggatcacagattgcggataaggaaagtcgccatctgctgttcattggtgatggtagcctgcaactgaccgtgcaggagctgggcctggcgatccgtgagaaactgaacccgatttgtttcatcatcaacaacgatggctataccgtagagcgcgagattcatgggcctacacagccgtacaatgacatcccgatgtggaactatagcaaactgccggaaacctttggcgcgacggaagatcgcgtagttagcaagatcgttcgcacagagaacgagtttgtgagtgtcatgaaagaagcgcaggccgatgttaaccgcatgtattggattgaactggttctggagaaagaagatgcaccgaaactgctgaagaagatggggaagctgtttgcagaacagaacaaa

SEQ ID NO: 136 - protein, 547 aa, Artificial Sequence
  Variant of branched-chain keto acid decarboxylase (kdcA) from Lactococcus lactis
MYTVGDYLLDRLHELGIEEIFGVPGDYNLQFLDQIIAREDMKWIGNANELNASYMADGYARTKKAAAFLTTFGVGELSAINGLAGSYAENLPVVEIVGSPTSKVQNDGKFVHHTLADGDFKHFMKMHEPVTAARTLLTAENATTEIDRVLSQLLKERKPVYINLPVDVAAAKAEKPALSLEKYSSTLNTTEQVILSKIEESLKNAQKPVVIAGHEVISFGLEKTVTQFVSETHLPITTLNFGKSAVDESLPSFLGIYNGKLSEISLKNFVESADFILMLGVKLTDISTGAFTHHLDENKMISLNIDEGIIFNKVVEDFDFRAVVSSLSELKGIEYEGQYIDKQYEEFIPSVAPLSQDRLWQAVESLTQSNETIVAEQGTSFFGASTIPLKSNSRFIGQPLWGSIGYTFPAALGSQIADKESRHLLFIGDGSLQLTVQELGLAIREKLNPICFIINNDGYTVEREIHGPTQPYNDIPMWNYSKLPETFGATEDRVVSKIVRTENEFVSVMKEAQADVNRMYWIELVLEKEDAPKLLKKMGKLFAEQNK

SEQ ID NO: 137 - DNA, 1641 bp, Artificial Sequence
  Variant of branched-chain keto acid decarboxylase (kdcA) from Lactococcus lactis
atgtacaccgttggcgactatctgctggaccgtctgcatgaactgggaattgaagaaatctttggcgtgccgggcgattacaatctgcaattcctggatcaaatcattgcgcgcgaagatatgaaatggattggtaacgcgaatgaactgaatgcgagctacatggctgatggctatgcacgtacgaagaaggcggcggcgttcctgacgaccttcggtgttggtgaactgagcgcaatcaatgggttggcgggcagctatgcagagaacctgccagtcgtggaaatcgttgggagtccgacctcgaaggtgcagaacgatggcaagttcgttcatcacaccctggccgacggcgacttcaagcacttcaggaagatgcacgaaccggtcaccgctgcacgtacacttctgaccgccgagaacgcgaccacagagattgaccgcgtgctgagccaactgctgaaagaacgtaaacctgtgtacatcaacctgccggttgatgtcgccgcggcgaaagccgagaaaccagctctgagcctggagaaagaaagcagcacgttaaacaccacagaacaggtgatcctgtcgaagatcgaagaaagcctgaagaacgcccagaaaccggtcgtgatcgctgggcacgaggtgattagcttcggtctggagaagacggttacgcagtttgtgagtgaaaccaaactgccgattactaccctgaactttggcaaatcggctgtggatgaatccctgccgtccttcctgggtatctacaatggtaaactgagcgagattagcctcaagaactttgtggaaagcgcagacttcatcctgatgcttggtgtgaaactgacggatatcagtacgggcgcgtttacgcaccatctggacgagaacaagatgattagcctgaacattgatgaaggcatcatcttcaacaaagtcgtagaagacttcgatttccgcgcggttgttagcagcctgagcgagctgaaaggcattgaatacgaaggtgaatacattgatagacagtacgaagagttcattccgagcagcgcaccactgtcgcaagaccgtctgtggcaagcagtagaatctctgacacagtccaatgaaaccattgtggcggaacagggcacgtcgttcttcggtgcctccaccatcttcctgaagagcaattcacgcttcatcggtcagccgctttggggcagcatcggctatacgtttccggcagcactgggatcacagattgcggataaggaaagtcgccatctgctgttcattggtgatggtagcctgcaactgaccgtgcaagagctgggcctggcgatccgtgagaaactgaacccgatttgtttcatcatcaacaacgatggctataccgtagagcgcgagattcatgggcctacacagccgtacaatgacatcccgatgtggaactatagcaaactgccggaaacctttggcgcgacggaagatcgcgtagttagcaagatcgttcgcacagagaacgagtttgtgagtgtcatgaaagaagcgcaggccgatgttaaccgcatgtattggattgaactggttctggagaaagaagatgcaccgaaactgctgaagaagatggggaagctgtttgcagaacagaacaaa

SEQ ID NO: 138 - protein, 547 aa, Artificial Sequence
  Variant of branched-chain keto acid decarboxylase (kdcA) from Lactococcus lactis
MYTVGDYLLDRLHELGIEEIFGVPGDYNLQFLDQIIAREDMKWIGNANELNASYMADGYARTKKAAAFLTTFGVGELSAINGLAGSYAENLPVVEIVGSPTSKVQNDGKFVHHTLADGDFKHFRKMHEPVTAARTLLTAENATTEIDRVLSQLLKERKPVYINLPVDVAAAKAEKPALSLEKESSTLNTTEQVILSKIEESLKNAQKPVVIAGHEVISFGLEKTVTQFVSETKLPITTLNFGKSAVDESLPSFLGIYNGKLSEISLKNFVESADFILMLGVKLTDISTGAFTHHLDENKMISLNIDEGIIFNKVVEDFDFRAVVSSLSELKGIEYEGEYIDRQYEEFIPSSAPLSQDRLWQAVESLTQSNETIVAEQGTSFFGASTIFLKSNSRFIGQPLWGSIGYTFPAALGSQIADKESRHLLFIGDGSLQLTVQELGLAIREKLNPICFIINNDGYTVEREIHGPTQPYNDIPMWNYSKLPETFGATEDRVVSKIVRTENEFVSVMKEAQADVNRMYWIELVLEKEDAPKLLKKMGKLFAEQNK

SEQ ID NO: 139 - DNA, 1641 bp, Artificial Sequence
  Variant of branched-chain keto acid decarboxylase (kdcA) from Lactococcus lactis
atgtacaccgttggcgactatctgctggaccgtctgcatgaactgggaattgaagaaatctttggcgtgccgggcgattacaatctgcaattcctggatcaaatcattgcgcgcgaagatatgagatggattggtaacgcgaatgaactgaatgcgagctacatggctgatggctatgcacgtacgaagaaggcggcggcgttcctgacgaccttcggtgttggtgaactgagcgcaatcaatgggttggcgggcagctatgcagagaacctgccagtcgtggaaatcgttgggagtccgacctcgaaggtgcagaacgatggcaagttcgttcatcacaccctggccgacggcgacttcaagcacttcatgaagatgcacgaaccggtcaccgctgcacgtacacttctgaccgccgagaacgcgaccacagagattgaccgcgtgctgagccaactgctgaaagaacgtaaacctgtgtacatcaacctgccggttgatgtcgccgcggcgaaagccgagaaaccagctctgagcctggagaaagaaagcagcacgttaaacaccacagaacaggtgatcctgtcgaagatcgaagaaagcctgaagaacgcccagaaaccggtcgtgatcgctgggcacgaggtgattagcttcggtctggagaagacggttacgcagtttgtgagtgaaaccaaactgccgattactaccctgaactttggcaaatcggctgtggatgaatccctgccgtccttcctgggtatctacaatggtaaactgagcgagattagcctcaagaactttgtggaaagcgcagacttcatcctgatgcttggtgtgaaactgacggatatcagtacgggcgcgtttacgcaccatctggacgagaacaagatgattagcctgaacattgatgaaggcatcatcttcaacaaagtcgtagaagacttcgatttcagcgcggttgttagcagcctgagcgagctgaacggcattgaatacgaaggtcaatacattgataaacagtacgaagagttcattccgagcagcgcaccactgtcgcaagaccgtctgtggcaagcagtagaatctctgacacagtccaatgaaaccattgtggcggaacagggcacgtcgttcttcggtgcctccaccatcttcctgaagagcaattcacgcttcatcggtcagccgctttggggcagcatcggctatacgtttccggcagcactgggatcacagattgcggataaggaaagtcgccatctgctgttcattggtgatggtagcctgcaactgaccgtgagcgagctgggcctggcgatccgtgagaaactgaacccgatttgtttcatcatcaacaacgatggctataccgtagagcgcgagattcatgggcctacacagccgtacaatgacatcccgatgtggaactatagcaaactgccggaaacctttggcgcgacggaagatcgcgtagttagcaagatcgttcgcacagagaacgagtttgtgagtgtcatgaaagaagcgcaggccgatgttaaccgcatgtattggattgaactggttctggagaaagaagatgcaccgaaactgctgaagaagatggggaagctgtttgcagaacagaacaaa

SEQ ID NO: 140 - protein, 547 aa, Artificial Sequence
  Variant of branched-chain keto acid decarboxylase (kdcA) from Lactococcus lactis
MYTVGDYLLDRLHELGIEEIFGVPGDYNLQFLDQIIAREDMRWIGNANELNASYMADGYARTKKAAAFLTTFGVGELSAINGLAGSYAENLPVVEIVGSPTSKVQNDGKFVHHTLADGDFKHFMKMHEPVTAARTLLTAENATTEIDRVLSQLLKERKPVYINLPVDVAAAKAEKPALSLEKESSTLNTTEQVILSKIEESLKNAQKPVVIAGHEVISFGLEKTVTQFVSETKLPITTLNFGKSAVDESLPSFLGIYNGKLSEISLKNFVESADFILMLGVKLTDISTGAFTHHLDENKMISLNIDEGIIFNKVVEDFDFSAVVSSLSELNGIEYEGQYIDKQYEEFIPSSAPLSQDRLWQAVESLTQSNETIVAEQGTSFFGASTIFLKSNSRFIGQPLWGSIGYTFPAALGSQIADKESRHLLFIGDGSLQLTVSELGLAIREKLNPICFIINNDGYTVEREIHGPTQPYNDIPMWNYSKLPETFGATEDRVVSKIVRTENEFVSVMKEAQADVNRMYWIELVLEKEDAPKLLKKMGKLFAEQNK

SEQ ID NO: 141 - DNA, 1641 bp, Artificial Sequence
  Variant of branched-chain keto acid decarboxylase (kdcA) from Lactococcus lactis
atgtacaccgttggcgactatctgctggaccgtctgcatgaactgggaattgaagaaatctttggcgtgccgggcgattacaatctgcaattcctggatcaaatcattgcgcgcgaagatatgaaatggattggtaacgcgaatgaactgaatgcgagctacatggctgatggctatgcacgtacgaagaaggcggcggcgttcctgacgaccttcggtgttggtgaactgagcgcaatcaatgggttggcgggcagctatgcagagaacctgccagtcgtggaaatcgttgggagtccgacctcgaaggtgcagaacgatggcaagttcgttcatcacaccctggccgacggcgacttcaagcacttcatgaagatgcacgaaccggtcaccgctgcacgtacactgctgaccgccgagaacgcgaccacagagattgaccgcgtgctgagccaactgctgaaagaacgtaaacctgtgtacatcaacctgccggttgatgtcgccgcggcgaaagccgagaaaccagctctgagcctggagaaagaaagcagcacgttaaacaccacagaacaggtgatcctgtcgaagatcgaagaaagcctgaagaacgcccagaaaccggtcgtgatcgctgggcacgaggtgattagcttcggtctggagaagacggttacgcagtttgtgagtgaaaccaaactgccgattactaccctgaactttggcaaatcggctgtggatgaatccctgccgtccttcctgggtatctacaatggtaaactgagcgagattagcctcaagaactttgtggaaagcgcagacttcatcctgatgcttggtgtgaaactgacggatatcagtacgggcgcgtttacgcaccatctggacgagaacaagatgattagcctgaacattgatgaaggcatcatcttcaacaaagtcgtagaagacttcgatttccgtgcggttgttagcagcctgagcgagctgaaaggcattgaatacgaaggtcaatacattgataagcagtacgaagagttcatcccgagcgtcgcaccactgagccaagaccgtctgtggcaagcagtagaatctctgacacagtccaatgaaaccattgtggcggaacagggcacgtcgttcttcggtgcctccaccatcttcctgaagagcaattcacgcttcatcggtcagccgctttggggcagcatcggctatacgtttccggcagcactgggatcacagattgcggataaggaaagtcgccatctgctgttcattggtgatggtagcctgcaactgaccgtgcaggagctgggcctggcgatccgtgagaaactgaacccgatttgtttcatcatcaacaacgatggctataccgtagagcgcgagattcatgggcctacacagccgtacaatgacatcccgatgtggaactatagcaaactgccggaaacctttggcgcgacggaagatcgcgtagttagcaagatcgttcgcacagagaacgagtttgtgagtgtcatgaaagaagcgcaggccgatgttaaccgcatgtattggattgaactggttctggagaaagaagatgcaccgaaactgctgaagaagatggggaagctgtttgcagaacagaacaaa

SEQ ID NO: 142 - protein, 547 aa, Artificial Sequence
  Variant of branched-chain keto acid decarboxylase (kdcA) from Lactococcus lactis
MYTVGDYLLDRLHELGIEEIFGVPGDYNLQFLDQIIAREDMKWIGNANELNASYMADGYARTKKAAAFLTTFGVGELSAINGLAGSYAENLPVVEIVGSPTSKVQNDGKFVHHTLADGDFKHFMKMHEPVTAARTLLTAENATTEIDRVLSQLLKERKPVYINLPVDVAAAKAEKPALSLEKESSTLNTTEQVILSKIEESLKNAQKPVVIAGHEVISFGLEKTVTQFVSETKLPITTLNFGKSAVDESLPSFLGIYNGKLSEISLKNFVESADFILMLGVKLTDISTGAFTHHLDENKMISLNIDEGIIFNKVVEDFDFRAVVSSLSELKGIEYEGQYIDKQYEEFIPSVAPLSQDRLWQAVESLTQSNETIVAEQGTSFFGASTIFLKSNSRFIGQPLWGSIGYTFPAALGSQIADKESRHLLFIGDGSLQLTVQELGLAIREKLNPICFIINNDGYTVEREIHGPTQPYNDIPMWNYSKLPETFGATEDRVVSKIVRTENEFVSVMKEAQADVNRMYWIELVLEKEDAPKLLKKMGKLFAEQNK

SEQ ID NO: 143 - DNA, 1641 bp, Artificial Sequence
  Variant of branched-chain keto acid decarboxylase (kdcA) from Lactococcus lactis
atgtacaccgttggcgactatctgctggaccgtctgcatgaactgggaattgaagaaatctttggcgtgccgggcgattacaatctgcaattcctggatcaaatcattgcgcgcgaagatatgagatggattggtaacgcgaatgaactgaatgcgagctacatggctgatggctatgcacgtacgaagaaggcggcggcgttcctgacgaccttcggtgttggtgaactgagcgcaatcaatgggttggcgggcagctatgcagagaacctgccagtcgtggaaatcgttgggagtccgacctcgaaggtgcagaacgatggcaagttcgttcatcacaccctggccgacggcgacttcaagcacttcaggaagatgcacgaaccggtcaccgctgcacgtacactgctgaccgccgagaacgcgaccacagagattgaccgcgtgctgagccaactgctgaaagaacgtaaacctgtgtacatcaacctgccggttgatgtcgccgcggcgaaagccgagaaaccagctctgagcctggagaaagaaagcagcacgttaaacaccacagaacaggtgatcctgtcgaagatcgaagaaagcctgaagaacgcccagaaaccggtcgtgatcgctgggcacgaggtgattagcttcggtctggagaagacggttacgcagtttgtgagtgaaaccaaactgccgattactaccctgaactttggcaaatcggctgtggatgaatccctgccgtccttcctgggtatctacaatggtaaactgagcgagattagcctcaagaactttgtggaaagcgcagacttcatcctgatgcttggtgtgaaactgacggatatcagtacgggcgcgtttacgcaccatctggacgagaacaagatgattagcctgaacattgatgaaggcatcatcttcaacaaagtcgtagaagacttcgatttcagcgcggttgttagcagcctgagcgagctgaaaggcattgaatacgaaggtcaatacattgataagcagtacgaagagttcattccgagcagcgcaccactgatgcaagaccgtctgtggcaagcagtagaatctctgacacagtccaatgaaaccattgtggcggaacagggcacgtcgttcttcggtgcctccaccatcttcctgaagagcaattcacgcttcatcggtcagccgctttggggcagcatcggctatacgtttccggcagcactgggatcacagattgcggataaggaaagtcgccatctgctgttcattggtgatggtagcctgcaactgaccgtgcaagagctgggcctggcgatccgtgagaaactgaacccgatttgtttcatcatcaacaacgatggctataccgtagagcgcgagattcatgggcctacacagccgtacaatgacatcccgatgtggaactatagcaaactgccggaaacctttggcgcgacggaagatcgcgtagttagcaagatcgttcgcacagagaacgagtttgtgagtgtcatgaaggaagcgcaggccgatgttaaccgcatgtattggattgaactggttctggagaaagaagatgcaccgaaactgctgaagaagatggggaagctgtttgcagaacagaacaaa

SEQ ID NO: 144 - protein, 547 aa, Artificial Sequence
  Variant of branched-chain keto acid decarboxylase (kdcA) from Lactococcus lactis
MYTVGDYLLDRLHELGIEEIFGVPGDYNLQFLDQIIAREDMRWIGNANELNASYMADGYARTKKAAAFLTTFGVGELSAINGLAGSYAENLPVVEIVGSPTSKVQNDGKFVHHTLADGDFKHFRKMHEPVTAARTLLTAENATTEIDRVLSQLLKERKPVYINLPVDVAAAKAEKPALSLEKESSTLNTTEQVILSKIEESLKNAQKPVVIAGHEVISFGLEKTVTQFVSETKLPITTLNFGKSAVDESLPSFLGIYNGKLSEISLKNFVESADFILMLGVKLTDISTGAFTHHLDENKMISLNIDEGIIFNKVVEDFDFSAVVSSLSELKGIEYEGQYIDKQYEEFIPSSAPLMQDRLWQAVESLTQSNETIVAEQGTSFFGASTIFLKSNSRFIGQPLWGSIGYTFPAALGSQIADKESRHLLFIGDGSLQLTVQELGLAIREKLNPICFIINNDGYTVEREIHGPTQPYNDIPMWNYSKLPETFGATEDRVVSKIVRTENEFVSVMKEAQADVNRMYWIELVLEKEDAPKLLKKMGKLFAEQNK

SEQ ID NO: 145 - DNA, 1641 bp, Artificial Sequence
  Variant of branched-chain keto acid decarboxylase (kdcA) from Lactococcus lactis
atgtacaccgttggcgactatctgctggaccgtctgcatgaactgggaattgaagaaatctttggcgtgccgggcgattacaatctgcaattcctggatcaaatcattgcgcgcgaagatatgaaatggattggtaacgcgaatgaactgaatgcgagctacatggctgatggctatgcacgtacgaagaaggcggcggcgttcctgacgaccttcggtgttggtgaactgagcgcaatcaatgggttggcgggcagctatgcagagaacctgccagtcgtggaaatcgttgggagtccgacctcgaaggtgcagaacgatggcaagttcgttcatcacaccctggccgacggcgacttcaagcacttctggaagatgcacgaaccggtcaccgctgcacgtacactgctgaccgccgagaacgcgaccacagagattgaccgcgtgctgagccaactgctgaaagaacgtaaacctgtgtacatcaacctgccggttgatgtcgccgcggcgaaagccgagaaaccagctctgagcctggagaaagaaagcagcacgttaaacaccacagaacaggtgatcctgtcgaagatcgaagaaagcctgaagaacgcccagaaaccggtcgtgatcgctgggcacgaggtgattagcttcggtctggagaagacggttacgcagtttgtgagtgaaaccaaactgccgattactaccctgaactttggcaaatcggctgtggatgaatccctgccgtccttcctgggtatctacaatggtaaactgagcgagattagcctcaagaactttgtggaaagcgcagacttcatcctgatgcttggtgtgaaactgacggatatcagtacgggcgcgtttacgcaccatctggacgagaacaagatgattagcctgaacattgatgaaggcatcatcttcaacaaagtcgtagaagacttcgatttccgtgcggttgtttttagcctgagcgagctgaagggcattgaatacgaaggtcaatacattgataagcagtacgaagagttcattccgagcagcgcaccactgagccaagaccgtctgtggcaagcagtagaatctctgacacagtccaatgaaaccattgtggcggaacagggcacgtcgttcttcggtgcctccaccatcttcctgaagagcaattcacgcttcatcggtcagccgctttggggcagcatcggctatacgtttccggcagcactgggatcacagattgcggataaggaaagtcgccatctgctgttcattggtgatggtagcctgcaactgaccgtgcaggagctgggcctggcgatccgtgagaaactgaacccgatttgtttcatcatcaacaacgatggctataccgtagagcgcgagattcatgggcctacacagccgtacaatgacatcccgatgtggaactatagcaaactgccggaaacctttggcgcgacggaagatcgcgtagttagcaagatcgttcgcacagagaacgagtttgtgagtgtcatgaaagaagcgcaggccgatgttaaccgcatgtattggattgaactggttctggagaaagaagatgcaccgaaactgctgaagaagatggggaagctgtttgcagaacagaacaaa

SEQ ID NO: 146 - protein, 547 aa, Artificial Sequence
  Variant of branched-chain keto acid decarboxylase (kdcA) from Lactococcus lactis
MYTVGDYLLDRLHELGIEEIFGVPGDYNLQFLDQIIAREDMKWIGNANELNASYMADGYARTKKAAAFLTTFGVGELSAINGLAGSYAENLPVVEIVGSPTSKVQNDGKFVHHTLADGDFKHFWKMHEPVTAARTLLTAENATTEIDRVLSQLLKERKPVYINLPVDVAAAKAEKPALSLEKESSTLNTTEQVILSKIEESLKNAQKPVVIAGHEVISFGLEKTVTQFVSETKLPITTLNFGKSAVDESLPSFLGIYNGKLSEISLKNFVESADFILMLGVKLTDISTGAFTHHLDENKMISLNIDEGIIFNKVVEDFDFRAVVFSLSELKGIEYEGQYIDKQYEEFIPSSAPLSQDRLWQAVESLTQSNETIVAEQGTSFFGASTIFLKSNSRFIGQPLWGSIGYTFPAALGSQIADKESRHLLFIGDGSLQLTVQELGLAIREKLNPICFIINNDGYTVEREIHGPTQPYNDIPMWNYSKLPETFGATEDRVVSKIVRTENEFVSVMKEAQADVNRMYWIELVLEKEDAPKLLKKMGKLFAEQNK

SEQ ID NO: 147 - DNA, 1641 bp, Artificial Sequence
  Variant of branched-chain keto acid decarboxylase (kdcA) from Lactococcus lactis
atgtacaccgttggcgactatctgctggaccgtctgcatgaactgggaattgaagaaatctttggcgtgccgggcgattacaatctgcaattcctggatcaaatcattgcgcgcgaagatatgagatggattggtaacgcgaatgaactgaatgcgagctacatggctgatggctatgcacgtacgaagaaggcggcggcgttcctgacgaccttcggtgttggtgaactgagcgcaatcaatgggttggcgggcagctatgcagagaacctgccagtcgtggaaatcgttgggagtccgacctcgaaggtgcagaacgatggcaagttcgttcatcacaccctggccgacggcgacttcaagcacttcatgaagatgcacgaaccggtcaccgctgcacgtacactgctgaccgccgagaacgcgaccacagagattgaccgcgtgctgagccaactgctgaaagaacgtaaacctgtgtacatcaacctgccggttgatgtcgccgcggcgaaagccgagaaaccagctctgagcctggagaaagaaagcagcacgttaaacaccacagaacaggtgatcctgtcgaagatcgaagaaagcctgaagtgggcccagaaaccggtcgtgatcgctgggcacgaggtgattagcttcggtctggagaagacggttacgcagtttgtgagtgaaaccaaactgccgattactaccctgaactttggcaaatcggctgtggatgaatccctgccgtccttcctgggtatctacaatggtaaactgagcgagattagcctcaagaactttgtggaaagcgcagacttcatcctgatgcttggtgtgaaactgacggatatcagtacgggcgcgtttacgcaccatctggacgagaacaagatgattagcctgaacattgatgaaggcatcatcttcaacaaagtcgtagaagacttcgatttcagcgcggttgttagcagcctgagcgagctgaaaggcattgaatacgaaggtcaatacattgataagcagtacgaagagttcattccgagcagcgcaccactgatgcaagaccgtctgtggcaagcagtagaatctctgacacagtccaatgaaaccattgtggcggaacagggcacgtcgttcttcggtgcctccaccatcttcctgaagagcaattcacgcttcatcggtcagccgctttggggcagcatcggctatacgtttccggcagcactgggatcacagattgcggataaggaaagtcgccatctgctgttcattggtgatggtagcctgcaactgaccgtgagcgagctgggcctggcgatccgtgagaaactgaacccgatttgtttcatcatcaacaacgatggctataccgtagagcgcgagattcatgggcctacacagccgtacaatgacatcccgatgtggaactatagcaaactgccggaaacctttggcgcgacggaagatcgcgtagttagcaagatcgttcgcacagagaacgagtttgtgagtgtcatgttcgaagcgcaggccgatgttaaccgcatgtattggattgaactggttctggagaaagaagatgcaccgaaactgctgaagaagatggggaagctgtttgcagaacagaacaaa

SEQ ID NO: 148 - protein, 547 aa, Artificial Sequence
  Variant of branched-chain keto acid decarboxylase (kdcA) from Lactococcus lactis
MYTVGDYLLDRLHELGIEEIFGVPGDYNLQFLDQIIAREDMRWIGNANELNASYMADGYARTKKAAAFLTTFGVGELSAINGLAGSYAENLPVVEIVGSPTSKVQNDGKFVHHTLADGDFKHFMKMHEPVTAARTLLTAENATTEIDRVLSQLLKERKPVYINLPVDVAAAKAEKPALSLEKESSTLNTTEQVILSKIEESLKWAQKPVVIAGHEVISFGLEKTVTQFVSETKLPITTLNFGKSAVDESLPSFLGIYNGKLSEISLKNFVESADFILMLGVKLTDISTGAFTHHLDENKMISLNIDEGIIFNKVVEDFDFSAVVSSLSELKGIEYEGQYIDKQYEEFIPSSAPLMQDRLWQAVESLTQSNETIVAEQGTSFFGASTIFLKSNSRFIGQPLWGSIGYTFPAALGSQIADKESRHLLFIGDGSLQLTVSELGLAIREKLNPICFIINNDGYTVEREIHGPTQPYNDIPMWNYSKLPETFGATEDRVVSKIVRTENEFVSVMFEAQADVNRMYWIELVLEKEDAPKLLKKMGKLFAEQNK

SEQ ID NO: 149 - DNA, 1641 bp, Artificial Sequence
  Variant of branched-chain keto acid decarboxylase (kdcA) from Lactococcus lactis
atgtacaccgttggcgactatctgctggaccgtctgcatgaactgggaattgaagaaatctttggcgtgccgggcgattacaatctgcaattcctggatcaaatcattgcgcgcgaagatatgagatggattggtaacgcgaatgaactgaatgcgagctacatggctgatggctatgcacgtacgaagaaggcggcggcgttcctgacgaccttcggtgttggtgaactgagcgcaatcaatgggttggcgggcagctatgcagagaacctgccagtcgtggaaatcgttgggagtccgacctcgaaggtgcagaacgatggcaagttcgttcatcacaccctggccgacggcgacttcaagcacttcaggaagatgcacgaaccggtcaccgctgcacgtacacatctgaccgccgagaacgcgaccacagagattgaccgcgtgctgagccaactgctgaaagaacgtaaacctgtgtacatcaacctgccggttgatgtcgccgcggcgaaagccgagaaaccagctctgagcctggagaaagaaagcagcacgttaaacaccacagaacaggtgatcctgtcgaagatcgaagaaagcctgaagaacgcccagaaaccggtcgtgatcgctgggcacgaggtgattagcttcggtctggagaagacggttacgcagtttgtgagtgaaaccaaactgccgattactaccctgaactttggcaaatcggctgtggatgaatccctgccgtccttcctgggtatctacaatggtaaactgagcgagattagcctcaagaactttgtggaaagcgcagacttcatcctgatgcttggtgtgaaactgacggatatcagtacgggcgcgtttacgcaccatctggacgagaacaagatgattagcctgaacattgatgaaggcatcatcttcaacaaagtcgtagaagacttcgatttccgtgcggttgttagcagcctgagcgagctgaacggcattgaatacgaaggtcaatacattgataaacagtacgaagagttcattccgagcagcgcaccactgagccaagaccgtctgtggcaagcagtagaatctctgacacagtccaatgaaaccattgtggcggaacagggcacgtcgttcttcggtgcctccaccatcttcctgaagagcaattcacgcttcatcggtcagccgctttggggcagcatcggctatacgtttccggcagcactgggatcacagattgcggataaggaaagtcgccatctgctgttcattggtgatggtagcctgcaactgaccgtgagcgagctgggcctggcgatccgtgagaaactgaacccgatttgtttcatcatcaacaacgatggctataccgtagagcgcgagattcatgggcctacacagccgtacaatgacatcccgatgtggaactatagcaaactgccggaaacctttggcgcgacggaagatcgcgtagttagcaagatcgttcgcacagagaacgagtttgtgagtgtcatgaaggaagcgcaggccgatgttaaccgcatgtattggattgaactggttctggagaaagaagatgcaccgaaactgctgaagaagatggggaagctgtttgcagaacagaacaaa

SEQ ID NO: 150 - protein, 547 aa, Artificial Sequence
  Variant of branched-chain keto acid decarboxylase (kdcA) from Lactococcus lactis
MYTVGDYLLDRLHELGIEEIFGVPGDYNLQFLDQIIAREDMRWIGNANELNASYMADGYARTKKAAAFLTTFGVGELSAINGLAGSYAENLPVVEIVGSPTSKVQNDGKFVHHTLADGDFKHFRKMHEPVTAARTHLTAENATTEIDRVLSQLLKERKPVYINLPVDVAAAKAEKPALSLEKESSTLNTTEQVILSKIEESLKNAQKPVVIAGHEVISFGLEKTVTQFVSETKLPITTLNFGKSAVDESLPSFLGIYNGKLSEISLKNFVESADFILMLGVKLTDISTGAFTHHLDENKMISLNIDEGIIFNKVVEDFDFRAVVSSLSELNGIEYEGQYIDKQYEEFIPSSAPLSQDRLWQAVESLTQSNETIVAEQGTSFFGASTIFLKSNSRFIGQPLWGSIGYTFPAALGSQIADKESRHLLFIGDGSLQLTVSELGLAIREKLNPICFIINNDGYTVEREIHGPTQPYNDIPMWNYSKLPETFGATEDRVVSKIVRTENEFVSVMKEAQADVNRMYWIELVLEKEDAPKLLKKMGKLFAEQNK

SEQ ID NO: 151 - DNA, 1641 bp, Artificial Sequence
  Variant of branched-chain keto acid decarboxylase (kdcA) from Lactococcus lactis
atgtacaccgttggcgactatctgctggaccgtctgcatgaactgggaattgaagaaatctttggcgtgccgggcgattacaatctgcaattcctggatcaaatcattgcgcgcgaagatatgaaatggattggtaacgcgaatgaactgaatgcgagctacatggctgatggctatgcacgtacgaagaaggcggcggcgttcctgacgaccttcggtgttggtgaactgagcgcaatcaatgggttggcgggcagctatgcagagaacctgccagtcgtggaaatcgttgggagtccgacctcgaaggtgcagaacgacggcaagttcgttcatcacaccctggccgacggcgacttcaagcacttcatgaagatgcacgaaccggtcaccgctgcacgtacactgctgaccgccgagaacgcgaccacagagattgaccgcgtgctgagccaactgctgaaagaacgtaaacctgtgtacatcaacctgccggttgatgtcgccgcggcgaaagccgagaaaccagctctgagcctggagaaagaaagcagcacgttaaacaccacagaacaggtgatcctgtcgaagatcgaagaaagcctgaagaacgcccagaaaccggtcgtgatcgctgggcacgaggtgattagcttcggtctggagaagacggttacgcagtttgtgagtgaaacccacctgccgattactaccctgaactttggcaaatcggctgtggatgaatccctgccgtccttcctgggtatctacaatggtaaactgagcgagattagcctcaagaactttgtggaaagcgcagacttcatcctgatgcttggtgtgaaactgacggatatcagtacgggcgcgtttacgcaccatctggacgagaacaagatgattagcctgaacattgatgaaggcatcatcttcaacaaagtcgtagaagacttcgatttccgtgcggttgtttctagcctgagcgagctgcttggcattgaatacgaaggtcaatacattgataagcagtacgaagagttcattccgagcagcgcaccactgtcgcaagaccgtctgtggcaagcagtagaatctctgacacagtccaatgaaaccattgtggcggaacagggcacgtcgttcttcggtgcctccaccatcccactgaagagcaattcacgcttcatcggtcagccgctttggggcagcatcggctatacgtttccggcagcactgggatcacagattgcggataaggaaagtcgccatctgctgttcattggtgatggtagcctgcaactgaccgtgcaggagctgggcctggcgatccgtgagagactgaacccgatttgtttcatcatcaacaacgatggctataccgtagagcgcgagattcatgggcctacacagccgtacaatgacatcccgatgtggaactatagcaaactgccggaaacctttggcgcgacggaagatcgcgtagttagcaagatcgttcgcacagagaacgagtttgtgagtgtcatgaaagaagcgcaggccgatgttaaccgcatgtattggattgaactggttctggagaaagaagatgcaccgaaactgctgaagaagatggggaagctgtttgcagaacagaacaaa

SEQ ID NO: 152 - protein, 547 aa, Artificial Sequence
  Variant of branched-chain keto acid decarboxylase (kdcA) from Lactococcus lactis
MYTVGDYLLDRLHELGIEEIFGVPGDYNLQFLDQIIAREDMKWIGNANELNASYMADGYARTKKAAAFLTTFGVGELSAINGLAGSYAENLPVVEIVGSPTSKVQNDGKFVHHTLADGDFKHFMKMHEPVTAARTLLTAENATTEIDRVLSQLLKERKPVYINLPVDVAAAKAEKPALSLEKESSTLNTTEQVILSKIEESLKNAQKPVVIAGHEVISFGLEKTVTQFVSETHLPITTLNFGKSAVDESLPSFLGIYNGKLSEISLKNFVESADFILMLGVKLTDISTGAFTHHLDENKMISLNIDEGIIFNKVVEDFDFRAVVSSLSELLGIEYEGQYIDKQYEEFIPSSAPLSQDRLWQAVESLTQSNETIVAEQGTSFFGASTIPLKSNSRFIGQPLWGSIGYTFPAALGSQIADKESRHLLFIGDGSLQLTVQELGLAIRERLNPICFIINNDGYTVEREIHGPTQPYNDIPMWNYSKLPETFGATEDRVVSKIVRTENEFVSVMKEAQADVNRMYWIELVLEKEDAPKLLKKMGKLFAEQNK

SEQ ID NO: 153 - DNA, 1641 bp, Artificial Sequence
  Variant of branched-chain keto acid decarboxylase (kdcA) from Lactococcus lactis
atgtacaccgttggcgactatctgctggaccgtctgcatgaactgggaattgaagaaatctttggcgtgccgggcgattacaatctgcaattcctggatcaaatcattgcgcgcgaagatatgaaatggattggtaacgcgaatgaactgaatgcgagctacatggctgatggctatgcacgtacgaagaaggcggcggcgttcctgacgaccttcggtgttggtgaactgagcgcaatcaatgggttggcgggcagctatgcagagaacctgccagtcgtggaaatcgttgggagtccgacctcgaaggtgcagaacgatggcaagttcgttcatcacaccctggccgacggcgacttcaagcacttcatgaagatgcacgaaccggtcaccgctgcacgtacacttctgaccgccgagaacgcgaccacagagattgaccgcgtgctgagccaactgctgaaagaacgtaaacctgtgtacatcaacctgccggttgatgtcgccgcggcgaaagccgagaaaccagctctgagcctggagaaagaaagcagcacgttaaacaccacagaacaggtgatcctgtcgaagatcgaagaaagcctgaagaacgcccagaaaccggtcgtgatcgctgggcacgaggtgattagcttcggtctggagaagacggttacgcagtttgtgagtgaaaccaaactgccgattactaccctgaactttggcaaatcggctgtggatgaatccctgccgtccttcctgggtatctacaatggtaaactgagcgagattagcctcaagaactttgtggaaagcgcagacttcatcctgatgcttggtgtgaaactgacggatatcagtacgggcgcgtttacgcaccatctggacgagaacaagatgattagcctgaacattgatgaaggcatcatcttcaacaaagtcgtagaagacttcgatttccgcgcggttgttagcagcctgtcggagctgaaaggcattgaatacgaaggtcaatacattgatagacagtacgaagagttcattccgagcagcgcaccactgttgcaagaccgtctgtggcaagcagtagaatctctgacacagtccaatgaaaccattgtggcggaacagggcacgtcgttcttcggtgcctccaccatcttcctgaagagcaattcacgcttcatcggtcagccgctttggggcagcatcggctatacgtttccggcagcactgggatcacagattgcggataaggaaagtcgccatctgctgttcattggtgatggtagcctgcaactgaccgtgagcgagctgggcctggcgatccgtgagaaactgaacccgatttgtttcatcatcaacaacgatggctataccgtagagcgcgagattcatgggcctacacagccgtacaatgacatcccgatgtggaactatagcaaactgccggaaacctttggcgcgacggaagatcgcgtagttagcaagatcgttcgcacagagaacgagtttgtgagtgtcatgaaggaagcgcaggccgatgttaaccgcatgtattggattgaactggttctggagaaagaagatgcaccgaaactgctgaagaagatggggaagctgtttgcagaacagaacaaa

SEQ ID NO: 154 - protein, 547 aa, Artificial Sequence
  Variant of branched-chain keto acid decarboxylase (kdcA) from Lactococcus lactis
MYTVGDYLLDRLHELGIEEIFGVPGDYNLQFLDQIIAREDMKWIGNANELNASYMADGYARTKKAAAFLTTFGVGELSAINGLAGSYAENLPVVEIVGSPTSKVQNDGKFVHHTLADGDFKHFMKMHEPVTAARTLLTAENATTEIDRVLSQLLKERKPVYINLPVDVAAAKAEKPALSLEKESSTLNTTEQVILSKIEESLKNAQKPVVIAGHEVISFGLEKTVTQFVSETKLPITTLNFGKSAVDESLPSFLGIYNGKLSEISLKNFVESADFILMLGVKLTDISTGAFTHHLDENKMISLNIDEGIIFNKVVEDFDFRAVVSSLSELKGIEYEGQYIDRQYEEFIPSSAPLLQDRLWQAVESLTQSNETIVAEQGTSFFGASTIFLKSNSRFIGQPLWGSIGYTFPAALGSQIADKESRHLLFIGDGSLQLTVSELGLAIREKLNPICFIINNDGYTVEREIHGPTQPYNDIPMWNYSKLPETFGATEDRVVSKIVRTENEFVSVMKEAQADVNRMYWIELVLEKEDAPKLLKKMGKLFAEQNK

SEQ ID NO: 155 - DNA, 1641 bp, Artificial Sequence
  Variant of branched-chain keto acid decarboxylase (kdcA) from Lactococcus lactis
atgtacaccgttggcgactatctgctggaccgtctgcatgaactgggaattgaagaaatctttggcgtgccgggcgattacaatctgcaattcctggatcaaatcattgcgcgcgaagatatgagatggattggtaacgcgaatgaactgaatgcgagctacatggctgatggctatgcacgtacgaagaaggcggcggcgttcctgacgaccttcggtgttggtgaactgagcgcaatcaatgggttggcgggcagctatgcagagaacctgccagtcgtggaaatcgttgggagtccgacctcgaaggtgcagaacgatggcaagttcgttcatcacaccctggccgacggcgacttcaagcacttcaggaagatgcacgaaccggtcaccgctgcacgtacacatctgaccgccgagaacgcgaccacagagattgaccgcgtgctgagccaactgctgaaagaacgtaaacctgtgtacatcaacctgccggttgatgtcgccgcggcgaaagccgagaaaccagctctgagcctggagaaagaaagcagcacgttaaacaccacagaacaggtgatcctgtcgaagatcgaagaaagcctgaagtgggcccagaaaccggtcgtgatcgctgggcacgaggtgattagcttcggtctggagaagacggttacgcagtttgtgagtgaaaccaaactgccgattactaccctgaactttggcaaatcggctgtggatgaatccctgccgtccttcctgggtatctacaatggtaaactgagcgagattagcctcaagaactttgtggaaagcgcagacttcatcctgatgcttggtgtgaaactgacggatatcagtacgggcgcgtttacgcaccatctggacgagaacaagatgattagcctgaacattgatgaaggcatcatcttcaacaaagtcgtagaagacttcgatttccgcgcggttgttagcagcctgagcgagctgaaaggcattgaatacgaaggtcaatacattgataagcagtacgaagagttcattccgagcagcgcaccactgagccaagaccgtctgtggcaagcagtagaatctctgacacagtccaatgaaaccattgtggcggaacagggcacgtcgttcttcggtgcctccaccatcttcctgaagagcaattcacgcttcatcggtcagccgctttggggcagcatcggctatacgtttccggcagcactgggatcacagattgcggataaggaaagtcgccatctgctgttcattggtgatggtagcctgcaactgaccgtgagcgagctgggcctggcgatccgtgagaaactgaacccgatttgtttcatcatcaacaacgatggctataccgtagagcgcgagattcatgggcctacacagccgtacaatgacatcccgatgtggaactatagcaaactgccggaaacctttggcgcgacggaagatcgcgtagttagcaagatcgttcgcacagagaacgagtttgtgagtgtcatgttcgaagcgcaggccgatgttaaccgcatgtattggattgaactggttctggagaaagaagatgcaccgaaactgctgaagaagatggggaagctgtttgcagaacagaacaaa

SEQ ID NO: 156 - protein, 547 aa, Artificial Sequence
  Variant of branched-chain keto acid decarboxylase (kdcA) from Lactococcus lactis
MYTVGDYLLDRLHELGIEEIFGVPGDYNLQFLDQIIAREDMRWIGNANELNASYMADGYARTKKAAAFLTTFGVGELSAINGLAGSYAENLPVVEIVGSPTSKVQNDGKFVHHTLADGDFKHFRKMHEPVTAARTHLTAENATTEIDRVLSQLLKERKPVYINLPVDVAAAKAEKPALSLEKESSTLNTTEQVILSKIEESLKWAQKPVVIAGHEVISFGLEKTVTQFVSETKLPITTLNFGKSAVDESLPSFLGIYNGKLSEISLKNFVESADFILMLGVKLTDISTGAFTHHLDENKMISLNIDEGIIFNKVVEDFDFRAVVSSLSELKGIEYEGQYIDKQYEEFIPSSAPLSQDRLWQAVESLTQSNETIVAEQGTSFFGASTIFLKSNSRFIGQPLWGSIGYTFPAALGSQIADKESRHLLFIGDGSLQLTVSELGLAIREKLNPICFIINNDGYTVEREIHGPTQPYNDIPMWNYSKLPETFGATEDRVVSKIVRTENEFVSVMFEAQADVNRMYWIELVLEKEDAPKLLKKMGKLFAEQNK

SEQ ID NO: 157 - DNA, 1641 bp, Artificial Sequence
  Variant of branched-chain keto acid decarboxylase (kdcA) from Lactococcus lactis
atgtacaccgttggcgactatctgctggaccgtctgcatgaactgggaattgaagaaatctttggcgtgccgggcgattacaatctgcaattcctggatcaaatcattgcgcgcgaagatatgaaatggattggtaacgcgaatgaactgaatgcgagctacatggctgatggctatgcacgtacgaagaaggcggcggcgttcctgacgaccttcggtgttggtgaactgagcgcaatcaatgggttggcgggcagctatgcagagaacctgccagtcgtggaaatcgttgggagtccgacctcgaaggtgcagaacgatggcaagttcgttcatcacaccctggccgacggcgacttcaagcacttcaggaagatgcacgaaccggtcaccgctgcacgtacacatctgaccgccgagaacgcgaccacagagattgaccgcgtgctgagccaactgctgaaagaacgtaaacctgtgtacatcaacctgccggttgatgtcgccgcggcgaaagccgagaaaccagctctgagcctggagaaagaaagcagcacgttaaacaccacagaacaggtgatcctgtcgaagatcgaagaaagcctgaagaacgcccagaaaccggtcgtgatcgctgggcacgaggtgattagcttcggtctggagaagacggttacgcagtttgtgagtgaaaccaaactgccgattactaccctgaactttggcaaatcggctgtggatgaatccctgccgtccttcctgggtatctacaatggtaaactgagcgagattagcctcaagaactttgtggaaagcgcagacttcatcctgatgcttggtgtgaaactgacggatatcagtacgggcgcgtttacgcaccatctggacgagaacaagatgattagcctgaacattgatgaaggcatcatcttcaacaaagtcgtagaagacttcgatttccgcgcggttgttagcagcctgagcgagctgaaaggcattgaatacgaaggtcaatacattgataagcagtacgaagagttcattccgagcagcgcaccactgagccaagaccgtctgtggcaagcagtagaatctctgacacagtccaatgaaaccattgtggcggaacagggcacgtcgttcttcggtgcctccaccatcttcctgaagagcaattcacgcttcatcggtcagccgctttggggcagcatcggctatacgtttccggcagcactgggatcacagattgcggataaggaaagtcgccatctgctgttcattggtgatggtagcctgcaactgaccgtgcaggagctgggcctggcgatccgtgagaaactgaacccgatttgtttcatcatcaacaacgatggctataccgtagagcgcgagattcatgggcctacacagccgtacaatgacatcccgatgtggaactatagcaaactgccggaaacctttggcgcgacggaagatcgcgtagttagcaagatcgttcgcacagagaacgagtttgtgagtgtcatgaaagaagcgcaggccgatgttaaccgcatgtattggattgaactggttctggagaaagaagatgcaccgaaactgctgaagaagatggggaagctgtttgcagaacagaacaaa

SEQ ID NO: 158 - protein, 547 aa, Artificial Sequence
  Variant of branched-chain keto acid decarboxylase (kdcA) from Lactococcus lactis
MYTVGDYLLDRLHELGIEEIFGVPGDYNLQFLDQIIAREDMKWIGNANELNASYMADGYARTKKAAAFLTTFGVGELSAINGLAGSYAENLPVVEIVGSPTSKVQNDGKFVHHTLADGDFKHFRKMHEPVTAARTHLTAENATTEIDRVLSQLLKERKPVYINLPVDVAAAKAEKPALSLEKESSTLNTTEQVILSKIEESLKNAQKPVVIAGHEVISFGLEKTVTQFVSETKLPITTLNFGKSAVDESLPSFLGIYNGKLSEISLKNFVESADFILMLGVKLTDISTGAFTHHLDENKMISLNIDEGIIFNKVVEDFDFRAVVSSLSELKGIEYEGQYIDKQYEEFIPSSAPLSQDRLWQAVESLTQSNETIVAEQGTSFFGASTIFLKSNSRFIGQPLWGSIGYTFPAALGSQIADKESRHLLFIGDGSLQLTVQELGLAIREKLNPICFIINNDGYTVEREIHGPTQPYNDIPMWNYSKLPETFGATEDRVVSKIVRTENEFVSVMKEAQADVNRMYWIELVLEKEDAPKLLKKMGKLFAEQNK

SEQ ID NO: 159 - DNA, 1641 bp, Artificial Sequence
  Variant of branched-chain keto acid decarboxylase (kdcA) from Lactococcus lactis
atgtacaccgttggcgactatctgctggaccgtctgcatgaactgggaattgaagaaatctttggcgtgccgggcgattacaatctgcaattcctggatcaaatcattgcgcgcgaagatatgaaatggattggtaacgcgaatgaactgaatgcgagctacatggctgatggctatgcacgtacgaagaaggcggcggcgttcctgacgaccttcggtgttggtgaactgagcgcaatcaatgggttggcgggcagctatgcagagaacctgccagtcgtggaaatcgttgggagtccgacctcgaaggtgcagaaccgaggcaagttcgttcatcacaccctggccgacggcgacttcaagcacttcatgaagatgcacgaaccggtcaccgctgcacgtacactgctgaccgccgagaacgcgaccacagagattgaccgcgtgctgagccaactgctgaaagaacgtaaacctgtgtacatcaacctgccggttgatgtcgccgcggcgaaagccgagaaaccagctctgagcctggagaaagaaagcagcacgttaaacaccacagaacaggtgatcctgtcgaagatcgaagaaagcctgaagaacgcccagaaaccggtcgtgatcgctgggcacgaggtgattagcttcggtctggagaagacggttacgcagtttgtgagtgaaaccaaactgccgattactaccctgaactttggcaaatcggctgtggatgaatccctgccgtccttcctgggtatctacaatggtaaactgagcgagattagcctcaagaactttgtggaaagcgcagacttcatcctgatgcttggtgtgaaactgacggatatcagtacgggcgcgtttacgcaccatctggacgagaacaagatgattagcctgaacattgatgaaggcatcatcttcaacaaagtcgtagaagacttcgatttccgtgcggttgttagcagcctgaacgagctgctaggcattgaatacgaaggtcaatacattgataagcagtacgaagagttcattccgagcagcgcaccactgagccaagaccgtctgtggcaagcagtagaatctctgacacagtccaatgaaaccattgtggcggaacagggcacgtcgttcttcggtgcctccaccatcttcctgaagagcaattcacgcttcatcggtcagccgctttggggcagcatcggctatacgtttccggcagcactgggatcacagattgcggataaggaaagtcgccatctgctgttcattggtgatggtagcctgcaactgaccgtgcaggagctgggcctggcgatccgtgagaaactgaacccgatttgtttcatcatcaacaacgatggctataccgtagagcgcgagattcatgggcctacacagccgtacaatgacatcccgatgtggaactatagcaaactgccggaaacctttggcgcgacggaagatcgcgtagttagcaagatcgttcgcacagagaacgagtttgtgagtgtcatgaaagaagcgcaggccgatgttaaccgcatgtattggattgaactggttctggagaaagaagatgcaccgaaactgctgaagaagatggggaagctgtttgcagaacagaacaaa

SEQ ID NO: 160 - protein, 547 aa, Artificial Sequence
  Variant of branched-chain keto acid decarboxylase (kdcA) from Lactococcus lactis
MYTVGDYLLDRLHELGIEEIFGVPGDYNLQFLDQIIAREDMKWIGNANELNASYMADGYARTKKAAAFLTTFGVGELSAINGLAGSYAENLPVVEIVGSPTSKVQNRGKFVHHTLADGDFKHFMKMHEPVTAARTLLTAENATTEIDRVLSQLLKERKPVYINLPVDVAAAKAEKPALSLEKESSTLNTTEQVILSKIEESLKNAQKPVVIAGHEVISFGLEKTVTQFVSETKLPITTLNFGKSAVDESLPSFLGIYNGKLSEISLKNFVESADFILMLGVKLTDISTGAFTHHLDENKMISLNIDEGIIFNKVVEDFDFRAVVSSLNELLGIEYEGQYIDKQYEEFIPSSAPLSQDRLWQAVESLTQSNETIVAEQGTSFFGASTIFLKSNSRFIGQPLWGSIGYTFPAALGSQIADKESRHLLFIGDGSLQLTVQELGLAIREKLNPICFIINNDGYTVEREIHGPTQPYNDIPMWNYSKLPETFGATEDRVVSKIVRTENEFVSVMKEAQADVNRMYWIELVLEKEDAPKLLKKMGKLFAEQNK

SEQ ID NO: 161 - DNA, 1641 bp, Artificial Sequence
  Variant of branched-chain keto acid decarboxylase (kdcA) from Lactococcus lactis
atgtacaccgttggcgactatctgctggaccgtctgcatgaactgggaattgaagaaatctttggcgtgccgggcgattacaatctgcaattcctggatcaaatcattgcgcgcgaagatatgagatggattggtaacgcgaatgaactgaatgcgagctacatggctgatggctatgcacgtacgaagaaggcggcggcgttcctgacgaccttcggtgttggtgaactgagcgcaatcaatgggttggcgggcagctatgcagagaacctgccagtcgtggaaatcgttgggagtccgacctcgaaggtgcagaacgatggcaagttcgttcatcacaccctggccgacggcgacttcaagcacttcatgaagatgcacgaaccggtcaccgctgcacgtacacatctgaccgccgagaacgcgaccacagagattgaccgcgtgctgagccaactgctgaaagaacgtaaacctgtgtacatcaacctgccggttgatgtcgccgcggcgaaagccgagaaaccagctctgagcctggagaaagaaagcagcacgttaaacaccacagaacaggtgatcctgtcgaagatcgaagaaagcctgaagaacgcccagaaaccggtcgtgatcgctgggcacgaggtgattagcttcggtctggagaagacggttacgcagtttgtgagtgaaaccaaactgccgattactaccctgaactttggcaaatcggctgtggatgaatccctgccgtccttcctgggtatctacaatggtaaactgagcgagattagcctcaagaactttgtggaaagcgcagacttcatcctgatgcttggtgtgaaactgacggatatcagtacgggcgcgtttacgcaccatctggacgagaacaagatgattagcctgaacattgatgaaggcatcatcttcaacaaagtcgtagaagacttcgatttccgcgcggttgttagcagcctgagcgagctgaaaggcattgaatacgaaggtcaatacattgataagcagtacgaagagttcattccgagcagcgcaccactgatgcaagaccgtctgtggcaagcagtagaatctctgacacagtccaatgaaaccattgtggcggaacagggcacgtcgttcttcggtgcctccaccatcttcctgaagagcaattcacgcttcatcggtcagccgctttggggcagcatcggctatacgtttccggcagcactgggatcacagattgcggataaggaaagtcgccatctgctgttcattggtgatggtagcctgcaactgaccgtgcaagagctgggcctggcgatccgtgagaaactgaacccgatttgtttcatcatcaacaacgatggctataccgtagagcgcgagattcatgggcctacacagccgtacaatgacatcccgatgtggaactatagcaaactgccggaaacctttggcgcgacggaagatcgcgtagttagcaagatcgttcgcacagagaacgagtttgtgagtgtcatgttcgaagcgcaggccgatgttaaccgcatgtattggattgaactggttctggagaaagaagatgcaccgaaactgctgaagaagatggggaagctgtttgcagaacagaacaaa

SEQ ID NO: 162 - protein, 547 aa, Artificial Sequence
  Variant of branched-chain keto acid decarboxylase (kdcA) from Lactococcus lactis
MYTVGDYLLDRLHELGIEEIFGVPGDYNLQFLDQIIAREDMRWIGNANELNASYMADGYARTKKAAAFLTTFGVGELSAINGLAGSYAENLPVVEIVGSPTSKVQNDGKFVHHTLADGDFKHFMKMHEPVTAARTHLTAENATTEIDRVLSQLLKERKPVYINLPVDVAAAKAEKPALSLEKESSTLNTTEQVILSKIEESLKNAQKPVVIAGHEVISFGLEKTVTQFVSETKLPITTLNFGKSAVDESLPSFLGIYNGKLSEISLKNFVESADFILMLGVKLTDISTGAFTHHLDENKMISLNIDEGIIFNKVVEDFDFRAVVSSLSELKGIEYEGQYIDKQYEEFIPSSAPLMQDRLWQAVESLTQSNETIVAEQGTSFFGASTIFLKSNSRFIGQPLWGSIGYTFPAALGSQIADKESRHLLFIGDGSLQLTVQELGLAIREKLNPICFIINNDGYTVEREIHGPTQPYNDIPMWNYSKLPETFGATEDRVVSKIVRTENEFVSVMFEAQADVNRMYWIELVLEKEDAPKLLKKMGKLFAEQNK

SEQ ID NO: 163 - DNA, 1641 bp, Artificial Sequence
  Variant of branched-chain keto acid decarboxylase (kdcA) from Lactococcus lactis
atgtacaccgttggcgactatctgctggaccgtctgcatgaactgggaattgaagaaatctttggcgtgccgggcgattacaatctgcaattcctggatcaaatcattgcgcgcgaagatatgaaatggattggtaacgcgaatgaactgaatgcgagctacatggctgatggctatgcacgtacgaagaaggcggcggcgttcctgacgaccttcggtgttggtgaactgagcgcaatcaatgggttggcgggcagctatgcagagaacctgccagtcgtggaaatcgttgggagtccgacctcgaaggtgcagaacgatggcaagttcgttcatcacaccctggccgacggcgacttcaagcacttcatgaagatgcacgaaccggtcaccgctgcacgtacacatctgaccgccgagaacgcgaccacagagattgaccgcgtgctgagccaactgctgaaagaacgtaaacctgtgtacatcaacctgccggttgatgtcgccgcggcgaaagccgagaaaccagctctgagcctggagaaagaaagcagcacgttaaacaccacagaacaggtgatcctgtcgaagatcgaagaaagcctgaagaacgcccagaaaccggtcgtgatcgctgggcacgaggtgattagcttcggtctggagaagacggttacgcagtttgtgagtgaaaccaaactgccgattactaccctgaactttggcaaatcggctgtggatgaatccctgccgtccttcctgggtatctacaatggtaaactgagcgagattagcctcaagaactttgtggaaagcgcagacttcatcctgatgcttggtgtgaaactgacggatatcagtacgggcgcgtttacgcaccatctggacgagaacaagatgattagcctgaacattgatgaaggcatcatcttcaacaaagtcgtagaagacttcgatttcagcgcggttgttagcagcctgagcgagctgaaaggcattgaatacgaaggtcaatacattgataagcagtacgaagagttcattccgagcagcgcaccactgagccaagaccgtctgtggcaagcagtagaatctctgacacagtccaatgaaaccattgtggcggaacagggcacgtcgttcttcggtgcctccaccatcttcctgaagagcaattcacgcttcatcggtcagccgctttggggcagcatcggctatacgtttccggcagcactgggatcacagattgcggataaggaaagtcgccatctgctgttcattggtgatggtagcctgcaactgaccgtgcaggagctgggcctggcgatccgtgagaaactgaacccgatttgtttcatcatcaacaacgatggctataccgtagagcgcgagattcatgggcctacacagccgtacaatgacatcccgatgtggaactatagcaaactgccggaaacctttggcgcgacggaagatcgcgtagttagcaagatcgttcgcacagagaacgagtttgtgagtgtcatgttcgaagcgcaggccgatgttaaccgcatgtattggattgaactggttctggagaaagaagatgcaccgaaactgctgaagaagatggggaagctgtttgcagaacagaacaaa

SEQ ID NO: 164 - protein, 547 aa, Artificial Sequence
  Variant of branched-chain keto acid decarboxylase (kdcA) from Lactococcus lactis
MYTVGDYLLDRLHELGIEEIFGVPGDYNLQFLDQIIAREDMKWIGNANELNASYMADGYARTKKAAAFLTTFGVGELSAINGLAGSYAENLPVVEIVGSPTSKVQNDGKFVHHTLADGDFKHFMKMHEPVTAARTHLTAENATTEIDRVLSQLLKERKPVYINLPVDVAAAKAEKPALSLEKESSTLNTTEQVILSKIEESLKNAQKPVVIAGHEVISFGLEKTVTQFVSETKLPITTLNFGKSAVDESLPSFLGIYNGKLSEISLKNFVESADFILMLGVKLTDISTGAFTHHLDENKMISLNIDEGIIFNKVVEDFDFSAVVSSLSELKGIEYEGQYIDKQYEEFIPSSAPLSQDRLWQAVESLTQSNETIVAEQGTSFFGASTIFLKSNSRFIGQPLWGSIGYTFPAALGSQIADKESRHLLFIGDGSLQLTVQELGLAIREKLNPICFIINNDGYTVEREIHGPTQPYNDIPMWNYSKLPETFGATEDRVVSKIVRTENEFVSVMFEAQADVNRMYWIELVLEKEDAPKLLKKMGKLFAEQNK

SEQ ID NO: 165 - DNA, 1641 bp, Artificial Sequence
  Variant of branched-chain keto acid decarboxylase (kdcA) from Lactococcus lactis
atgtacaccgttggcgactatctgctggaccgtctgcatgaactgggaattgaagaaatctttggcgtgccgggcgattacaatctgcaattcctggatcaaatcattgcgcgcgaagatatgaaatggattggtaacgcgaatgaactgaatgcgagctacatggctgatggctatgcacgtacgaagaaggcggcggcgttcctgacgaccttcggtgttggtgaactgagcgcaatcaatgggttggcgggcagctatgcagagaacctgccagtcgtggaaatcgttgggagtccgacctcgaaggtgcagaacgatggcaagttcgttcatcacaccctggccgacggcgacttcaagcacttcatgaagatgcacgaaccggtcaccgctgcacgtacactgctgaccgccgagaacgcgaccacagagattgaccgcgtgctgagccaactgctgaaagaacgtaaacctgtgtacatcaacctgccggttgatgtcgccgcggcgaaagccgagaaaccagctctgagcctggagaaagaaagcccgacgttaaacaccacagaacaggtgatcctgtcgaagatcgaagaaagcctgaagaacgcccagaaaccggtcgtgatcgctgggcacgaggtgattagcttcggtctggagaagacggttacgcagtttgtgagtgaaacccacctgccgattactaccctgaactttggcaaatcggctgtggatgaatccctgccgtccttcctgggtatctacaatggttcactgagcgagattagcctcaagaactttgtggaaagcgcagacttcatcctgatgcttggtgtgaaactgacggatatcagtacgggcgcgtttacgcaccatctggacgagaacaagatgattagcctgaacattgatgaaggcatcatcttcaacaaagtcgtagaagacttcgatttccgtgcggttgttagcagcctgaacgagctgctaggcattgaatacgaaggtcaatacattgataagcagtacgaagagttcattccgagcagcgcaccactgagccaagaccgtctgtggcaagcagtagaatctctgacacagtccaatgaaaccattgtggcggaacagggcacgtcgttcttcggtgcctccaccatcttcctgaagagcaattcacgcttcatcggtcagccgctttggggcagcatcggctatacgtttccggcagcactgggatcacagattgcggatgacgaaagtcgccatctgctgttcattggtgatggtagcctgcaactgaccgtgcaggagctgggcctggcgatccgtgagaaactgaacccgatttgtttcatcatcaacaacgatggctataccgtagagcgcgagattcatgggcctacacagccgtacaatgacatcccgatgtggaactatagcaaactgccggaaacctttggcgcgacggaagatcgcgtagttagcaagatcgttcgcacagagaacgagtttgtgagtgtcatgaaagaagcgcaggccgatgttaaccgcatgtattggattgaactggttctggagaaagaagatgcaccgaaactgctgaagaagatggggaagctgtttgcagaacagaacaaa

SEQ ID NO: 166 - protein, 547 aa, Artificial Sequence
  Variant of branched-chain keto acid decarboxylase (kdcA) from Lactococcus lactis
MYTVGDYLLDRLHELGIEEIFGVPGDYNLQFLDQIIAREDMKWIGNANELNASYMADGYARTKKAAAFLTTFGVGELSAINGLAGSYAENLPVVEIVGSPTSKVQNDGKFVHHTLADGDFKHFMKMHEPVTAARTLLTAENATTEIDRVLSQLLKERKPVYINLPVDVAAAKAEKPALSLEKESPTLNTTEQVILSKIEESLKNAQKPVVIAGHEVISFGLEKTVTQFVSETHLPITTLNFGKSAVDESLPSFLGIYNGSLSEISLKNFVESADFILMLGVKLTDISTGAFTHHLDENKMISLNIDEGIIFNKVVEDFDFRAVVSSLNELLGIEYEGQYIDKQYEEFIPSSAPLSQDRLWQAVESLTQSNETIVAEQGTSFFGASTIFLKSNSRFIGQPLWGSIGYTFPAALGSQIADDESRHLLFIGDGSLQLTVQELGLAIREKLNPICFIINNDGYTVEREIHGPTQPYNDIPMWNYSKLPETFGATEDRVVSKIVRTENEFVSVMKEAQADVNRMYWIELVLEKEDAPKLLKKMGKLFAEQNK

SEQ ID NO: 167 - DNA, 1641 bp, Artificial Sequence
  Variant of branched-chain keto acid decarboxylase (kdcA) from Lactococcus lactis
atgtacaccgttggcgactatctgctggaccgtctgcatgaactgggaattgaagaaatctttggcgtgccgggcgattacaatctgcaattcctggatcaaatcattgcgcgcgaagatatgaaatggattggtaacgcgaatgaactgaatgcgagctacatggctgatggctatgcacgtacgaagaaggcggcggcgttcctgacgaccttcggtgttggtgaactgagcgcaatcaatgggttggcgggcagctatgcagagaacctgccagtcgtggaaatcgttgggagtccgacctcgaaggtgcagaaccgaggcaagttcgttcatcacaccctggccgacggcgacttcaagcacttcatgaagatgcacgaaccggtcaccgctgcacgtacactgctgaccgccgagaacgcgaccacagagattgaccgcgtgctgagccaactgctgaaagaacgtaaacctgtgtacatcaacctgccggttgatgtcgccgcggcgaaagccgagaaaccagctctgagcctggagaaagaaagctcgacgttaaacaccacagaacaggtgatcctgtcgaagatcgaagaaagcctgaagaacgcccagaaaccggtcgtgatcgctgggcacgaggtgattagcttcggtctggagaagacggttacgcagtttgtgagtgaaacccacctgccgattactaccctgaactttggcaaatcggctgtggatgaatccctgccgtccttcctgggtatctacaatggtaaactgagcgagattagcctcaagaactttgtggaaagcgcagacttcatcctgatgcttggtgtgaaactgacggatatcagtacgggcgcgtttacgcaccatctggacgagaacaagatgattagcctgaacattgatgaaggcatcatcttcaacaaagtcgtagaagacttcgatttccgtgcggttgttagcagcctgagcgagctgaaaggcattgaatacgaaggtcaatacattgataagcagtacgaagagttcgacccgagctcagcaccactgagccaagaccgtctgtggcaagcagtagaatctctgacacagtccaatgaaaccattgtggcggaacagggcacgtcgttcttcggtgcctccaccatcttcctgaagagcaattcacgcttcatcggtcagccgctttggggcagcatcggctatacgtttccggcagcactgggatcacagattgcggataaggaaagtcgccatctgctgttcattggtgatggtagcctgcaactgaccgtgcaggagctgggcctggcgatccgtgagaaactgaacccgatttgtttcatcatcaacaacgatggctataccgtagagcgcgagattcatgggcctacacagccgtacaatgacatcccgatgtggaactatagcaaactgccggaaacctttggcgcgacggaagatcgcgtagttagcaagatcgttcgcacagagaacgagtttgtgagtgtcatgaaagaagcgcaggccgatgttaaccgcatgtattggattgaactggttctggagaaagaagatgcaccgaaactgctgaagaagatggggaagctgtttgcagaacagaacaaa

SEQ ID NO: 168 - protein, 547 aa, Artificial Sequence
  Variant of branched-chain keto acid decarboxylase (kdcA) from Lactococcus lactis
MYTVGDYLLDRLHELGIEEIFGVPGDYNLQFLDQIIAREDMKWIGNANELNASYMADGYARTKKAAAFLTTFGVGELSAINGLAGSYAENLPVVEIVGSPTSKVQNRGKFVHHTLADGDFKHFMKMHEPVTAARTLLTAENATTEIDRVLSQLLKERKPVYINLPVDVAAAKAEKPALSLEKESSTLNTTEQVILSKIEESLKNAQKPVVIAGHEVISFGLEKTVTQFVSETHLPITTLNFGKSAVDESLPSFLGIYNGKLSEISLKNFVESADFILMLGVKLTDISTGAFTHHLDENKMISLNIDEGIIFNKVVEDFDFRAVVSSLSELKGIEYEGQYIDKQYEEFDPSSAPLSQDRLWQAVESLTQSNETIVAEQGTSFFGASTIFLKSNSRFIGQPLWGSIGYTFPAALGSQIADKESRHLLFIGDGSLQLTVQELGLAIREKLNPICFIINNDGYTVEREIHGPTQPYNDIPMWNYSKLPETFGATEDRVVSKIVRTENEFVSVMKEAQADVNRMYWIELVLEKEDAPKLLKKMGKLFAEQNK

SEQ ID NO: 169 - DNA, 1641 bp, Artificial Sequence
  Variant of branched-chain keto acid decarboxylase (kdcA) from Lactococcus lactis
atgtacaccgttggcgactatctgctggaccgtctgcatgaactgggaattgaagaaatctttggcgtgccgggcgattacaatctgcaattcctggatcaaatcattgcgcgcgaagatatgaaatggattggtaacgcgaatgaactgaatgcgagctacatggctgatggctatgcacgtacgaagaaggcggcggcgttcctgacgaccttcggtgttggtgaactgagcgcaatcaatgggttggcgggcagctatgcagagaacctgccagtcgtggaaatcgttgggagtccgacctcgaaggtgcagaacgatggcaagttcgttcatcacaccctggccgacggcgacttcaagcacttcaggaagatgcacgaaccggtcaccgctgcacgtacactgctgaccgccgagaacgcgaccacagagattgaccgcgtgctgagccaactgctgaaagaacgtaaacctgtgtacatcaacctgccggttgatgtcgccgcggcgaaagccgagaaaccagctctgagcctggagaaagaaagcagcacgttaaacaccacagaacaggtgatcctgtcgaagatcgaagaaagcctgaagaacgcccagaaaccggtcgtgatcgctgggcacgaggtgattagcttcggtctggagaagacggttacgcagtttgtgagtgaaaccaaactgccgattactaccctgaactttggcaaatcggctgtggatgaatccctgccgtccttcctgggtatctacaatggtaaactgagcgagattagcctcaagaactttgtggaaagcgcagacttcatcctgatgcttggtgtgaaactgacggatatcagtacgggcgcgtttacgcaccatctggacgagaacaagatgattagcctgaacattgatgaaggcatcatcttcaacaaagtcgtagaagacttcgatttccgcgcggttgttagcagcctgtcggagctgaacggcattgaatacgaaggtgaatacattgatagacagtacgaagagttcattccgagcagcgcaccactgttgcaagaccgtctgtggcaagcagtagaatctctgacacagtccaatgaaaccattgtggcggaacagggcacgtcgttcttcggtgcctccaccatcttcctgaagagcaattcacgcttcatcggtcagccgctttggggcagcatcggctatacgtttccggcagcactgggatcacagattgcggataaggaaagtcgccatctgctgttcattggtgatggtagcctgcaactgaccgtgcaagagctgggcctggcgatccgtgagaaactgaacccgatttgtttcatcatcaacaacgatggctataccgtagagcgcgagattcatgggcctacacagccgtacaatgacatcccgatgtggaactatagcaaactgccggaaacctttggcgcgacggaagatcgcgtagttagcaagatcgttcgcacagagaacgagtttgtgagtgtcatgaaggaagcgcaggccgatgttaaccgcatgtattggattgaactggttctggagaaagaagatgcaccgaaactgctgaagaagatggggaagctgtttgcagaacagaacaaa

SEQ ID NO: 170 - protein, 547 aa, Artificial Sequence
  Variant of branched-chain keto acid decarboxylase (kdcA) from Lactococcus lactis
MYTVGDYLLDRLHELGIEEIFGVPGDYNLQFLDQIIAREDMKWIGNANELNASYMADGYARTKKAAAFLTTFGVGELSAINGLAGSYAENLPVVEIVGSPTSKVQNDGKFVHHTLADGDFKHFRKMHEPVTAARTLLTAENATTEIDRVLSQLLKERKPVYINLPVDVAAAKAEKPALSLEKESSTLNTTEQVILSKIEESLKNAQKPVVIAGHEVISFGLEKTVTQFVSETKLPITTLNFGKSAVDESLPSFLGIYNGKLSEISLKNFVESADFILMLGVKLTDISTGAFTHHLDENKMISLNIDEGIIFNKVVEDFDFRAVVSSLSELNGIEYEGEYIDRQYEEFIPSSAPLLQDRLWQAVESLTQSNETIVAEQGTSFFGASTIFLKSNSRFIGQPLWGSIGYTFPAALGSQIADKESRHLLFIGDGSLQLTVQELGLAIREKLNPICFIINNDGYTVEREIHGPTQPYNDIPMWNYSKLPETFGATEDRVVSKIVRTENEFVSVMKEAQADVNRMYWIELVLEKEDAPKLLKKMGKLFAEQNK

SEQ ID NO: 171 - DNA, 1641 bp, Artificial Sequence
  Variant of branched-chain keto acid decarboxylase (kdcA) from Lactococcus lactis
atgtacaccgttggcgactatctgctggaccgtctgcatgaactgggaattgaagaaatctttggcgtgccgggcgattacaatctgcaattcctggatcaaatcattgcgcgcgaagatatgaaatggattggtaacgcgaatgaactgaatgcgagctacatggctgatggctatgcacgtacgaagaaggcggcggcgttcctgacgaccttcggtgttggtgaactgagcgcaatcaatgggttggcgggcagctatgcagagaacctgccagtcgtggaaatcgttgggagtccgacctcgaaggtgcagaacgatggcaagttcgttcatcacaccctggccgacggcgacttcaagcacttcaggaagatgcacgaaccggtcaccgctgcacgtacacttctgaccgccgagaacgcgaccacagagattgaccgcgtgctgagccaactgctgaaagaacgtaaacctgtgtacatcaacctgccggttgatgtcgccgcggcgaaagccgagaaaccagctctgagcctggagaaagaaagcagcacgttaaacaccacagaacaggtgatcctgtcgaagatcgaagaaagcctgaagaacgcccagaaaccggtcgtgatcgctgggcacgaggtgattagcttcggtctggagaagacggttacgcagtttgtgagtgaaaccaaactgccgattactaccctgaactttggcaaatcggctgtggatgaatccctgccgtccttcctgggtatctacaatggtaaactgagcgagattagcctcaagaactttgtggaaagcgcagacttcatcctgatgcttggtgtgaaactgacggatatcagtacgggcgcgtttacgcaccatctggacgagaacaagatgattagcctgaacattgatgaaggcatcatcttcaacaaagtcgtagaagacttcgatttccgcgcggttgttagcagcctgttggagctgaccggcattgaatacgaaggtgaatacattgataaacagtacgaagagttcattccgagcagcgcaccactgtcgcaagaccgtctgtggcaagcagtagaatctctgacacagtccaatgaaaccattgtggcggaacagggcacgtcgttcttcggtgcctccaccatcttcctgaagagcaattcacgcttcatcggtcagccgctttggggcagcatcggctatacgtttccggcagcactgggatcacagattgcggataaggaaagtcgccatctgctgttcattggtgatggtagcctgcaactgaccgtgcaggagctgggcctggcgatccgtgagaaactgaacccgatttgtttcatcatcaacaacgatggctataccgtagagcgcgagattcatgggcctacacagccgtacaatgacatcccgatgtggaactatagcaaactgccggaaacctttggcgcgacggaagatcgcgtagttagcaagatcgttcgcacagagaacgagtttgtgagtgtcatgaaggaagcgcaggccgatgttaaccgcatgtattggattgaactggttctggagaaagaagatgcaccgaaactgctgaagaagatggggaagctgtttgcagaacagaacaaa

SEQ ID NO: 172 - protein, 547 aa, Artificial Sequence
  Variant of branched-chain keto acid decarboxylase (kdcA) from Lactococcus lactis
MYTVGDYLLDRLHELGIEEIFGVPGDYNLQFLDQIIAREDMKWIGNANELNASYMADGYARTKKAAAFLTTFGVGELSAINGLAGSYAENLPVVEIVGSPTSKVQNDGKFVHHTLADGDFKHFRKMHEPVTAARTLLTAENATTEIDRVLSQLLKERKPVYINLPVDVAAAKAEKPALSLEKESSTLNTTEQVILSKIEESLKNAQKPVVIAGHEVISFGLEKTVTQFVSETKLPITTLNFGKSAVDESLPSFLGIYNGKLSEISLKNFVESADFILMLGVKLTDISTGAFTHHLDENKMISLNIDEGIIFNKVVEDFDFRAVVSSLLELTGIEYEGEYIDKQYEEFIPSSAPLSQDRLWQAVESLTQSNETIVAEQGTSFFGASTIFLKSNSRFIGQPLWGSIGYTFPAALGSQIADKESRHLLFIGDGSLQLTVQELGLAIREKLNPICFIINNDGYTVEREIHGPTQPYNDIPMWNYSKLPETFGATEDRVVSKIVRTENEFVSVMKEAQADVNRMYWIELVLEKEDAPKLLKKMGKLFAEQNK

SEQ ID NO: 173 - DNA, 1641 bp, Artificial Sequence
  Variant of branched-chain keto acid decarboxylase (kdcA) from Lactococcus lactis
atgtacaccgttggcgactatctgctggaccgtctgcatgaactgggaattgaagaaatctttggcgtgccgggcgattacaatctgcaattcctggatcaaatcattgcgcgcgaagatatgaaatggattggtaacgcgaatgaactgaatgcgagctacatggctgatggctatgcacgtacgaagaaggcggcggcgttcctgacgaccttcggtgttggtgaactgagcgcaatcaatgggttggcgggcagctatgcagagaacctgccagtcgtggaaatcgttgggagtccgacctcgaaggtgcagaacgatggcaagttcgttcatcacaccctggccgacggcgacttcaagcacttcatgaagatgcacgaaccggtcaccgctgcacgtacacatctgaccgccgagaacgcgaccacagagattgaccgcgtgctgagccaactgctgaaagaacgtaaacctgtgtacatcaacctgccggttgatgtcgccgcggcgaaagccgagaaaccagctctgagcctggagaaagaaagcagcacgttaaacaccacagaacaggtgatcctgtcgaagatcgaagaaagcctgaagtgggcccagaaaccggtcgtgatcgctgggcacgaggtgattagcttcggtctggagaagacggttacgcagtttgtgagtgaaaccaaactgccgattactaccctgaactttggcaaatcggctgtggatgaatccctgccgtccttcctgggtatctacaatggtaaactgagcgagattagcctcaagaactttgtggaaagcgcagacttcatcctgatgcttggtgtgaaactgacggatatcagtacgggcgcgtttacgcaccatctggacgagaacaagatgattagcctgaacattgatgaaggcatcatcttcaacaaagtcgtagaagacttcgatttccgcgcggttgttagcagcctgagcgagctgaaaggcattgaatacgaaggtcaatacattgataagcagtacgaagagttcattccgagcagcgcaccactgtcgcaagaccgtctgtggcaagcagtagaatctctgacacagtccaatgaaaccattgtggcggaacagggcacgtcgttcttcggtgcctccaccatcttcctgaagagcaattcacgcttcatcggtcagccgctttggggcagcatcggctatacgtttccggcagcactgggatcacagattgcggataaggaaagtcgccatctgctgttcattggtgatggtagcctgcaactgaccgtgagcgagctgggcctggcgatccgtgagaaactgaacccgatttgtttcatcatcaacaacgatggctataccgtagagcgcgagattcatgggcctacacagccgtacaatgacatcccgatgtggaactatagcaaactgccggaaacctttggcgcgacggaagatcgcgtagttagcaagatcgttcgcacagagaacgagtttgtgagtgtcatgaaggaagcgcaggccgatgttaaccgcatgtattggattgaactggttctggagaaagaagatgcaccgaaactgctgaagaagatggggaagctgtttgcagaacagaacaaa

SEQ ID NO: 174 - protein, 547 aa, Artificial Sequence
  Variant of branched-chain keto acid decarboxylase (kdcA) from Lactococcus lactis
MYTVGDYLLDRLHELGIEEIFGVPGDYNLQFLDQIIAREDMKWIGNANELNASYMADGYARTKKAAAFLTTFGVGELSAINGLAGSYAENLPVVEIVGSPTSKVQNDGKFVHHTLADGDFKHFMKMHEPVTAARTHLTAENATTEIDRVLSQLLKERKPVYINLPVDVAAAKAEKPALSLEKESSTLNTTEQVILSKIEESLKWAQKPVVIAGHEVISFGLEKTVTQFVSETKLPITTLNFGKSAVDESLPSFLGIYNGKLSEISLKNFVESADFILMLGVKLTDISTGAFTHHLDENKMISLNIDEGIIFNKVVEDFDFRAVVSSLSELKGIEYEGQYIDKQYEEFIPSSAPLSQDRLWQAVESLTQSNETIVAEQGTSFFGASTIFLKSNSRFIGQPLWGSIGYTFPAALGSQIADKESRHLLFIGDGSLQLTVSELGLAIREKLNPICFIINNDGYTVEREIHGPTQPYNDIPMWNYSKLPETFGATEDRVVSKIVRTENEFVSVMKEAQADVNRMYWIELVLEKEDAPKLLKKMGKLFAEQNK

SEQ ID NO: 175 - DNA, 1641 bp, Artificial Sequence
  Variant of branched-chain keto acid decarboxylase (kdcA) from Lactococcus lactis
atgtacaccgttggcgactatctgctggaccgtctgcatgaactgggaattgaagaaatctttggcgtgccgggcgattacaatctgcaattcctggatcaaatcattgcgcgcgaagatatgagatggattggtaacgcgaatgaactgaatgcgagctacatggctgatggctatgcacgtacgaagaaggcggcggcgttcctgacgaccttcggtgttggtgaactgagcgcaatcaatgggttggcgggcagctatgcagagaacctgccagtcgtggaaatcgttgggagtccgacctcgaaggtgcagaacgatggcaagttcgttcatcacaccctggccgacggcgacttcaagcacttcatgaagatgcacgaaccggtcaccgctgcacgtacacatctgaccgccgagaacgcgaccacagagattgaccgcgtgctgagccaactgctgaaagaacgtaaacctgtgtacatcaacctgccggttgatgtcgccgcggcgaaagccgagaaaccagctctgagcctggagaaagaaagcagcacgttaaacaccacagaacaggtgatcctgtcgaagatcgaagaaagcctgaagaacgcccagaaaccggtcgtgatcgctgggcacgaggtgattagcttcggtctggagaagacggttacgcagtttgtgagtgaaaccaaactgccgattactaccctgaactttggcaaatcggctgtggatgaatccctgccgtccttcctgggtatctacaatggtaaactgagcgagattagcctcaagaactttgtggaaagcgcagacttcatcctgatgcttggtgtgaaactgacggatatcagtacgggcgcgtttacgcaccatctggacgagaacaagatgattagcctgaacattgatgaaggcatcatcttcaacaaagtcgtagaagacttcgatttccgcgcggttgttagcagcctgttggagctgacaggcattgaatacgaaggtcaatacattgataaacagtacgaagagttcattccgagcagcgcaccactgagccaagaccgtctgtggcaagcagtagaatctctgacacagtccaatgaaaccattgtggcggaacagggcacgtcgttcttcggtgcctccaccatcttcctgaagagcaattcacgcttcatcggtcagccgctttggggcagcatcggctatacgtttccggcagcactgggatcacagattgcggataaggaaagtcgccatctgctgttcattggtgatggtagcctgcaactgaccgtgcaagagctgggcctggcgatccgtgagaaactgaacccgatttgtttcatcatcaacaacgatggctataccgtagagcgcgagattcatgggcctacacagccgtacaatgacatcccgatgtggaactatagcaaactgccggaaacctttggcgcgacggaagatcgcgtagttagcaagatcgttcgcacagagaacgagtttgtgagtgtcatgaaagaagcgcaggccgatgttaaccgcatgtattggattgaactggttctggagaaagaagatgcaccgaaactgctgaagaagatggggaagctgtttgcagaacagaacaaa

SEQ ID NO: 176 - protein, 547 aa, Artificial Sequence
  Variant of branched-chain keto acid decarboxylase (kdcA) from Lactococcus lactis
MYTVGDYLLDRLHELGIEEIFGVPGDYNLQFLDQIIAREDMRWIGNANELNASYMADGYARTKKAAAFLTTFGVGELSAINGLAGSYAENLPVVEIVGSPTSKVQNDGKFVHHTLADGDFKHFMKMHEPVTAARTHLTAENATTEIDRVLSQLLKERKPVYINLPVDVAAAKAEKPALSLEKESSTLNTTEQVILSKIEESLKNAQKPVVIAGHEVISFGLEKTVTQFVSETKLPITTLNFGKSAVDESLPSFLGIYNGKLSEISLKNFVESADFILMLGVKLTDISTGAFTHHLDENKMISLNIDEGIIFNKVVEDFDFRAVVSSLLELTGIEYEGQYIDKQYEEFIPSSAPLSQDRLWQAVESLTQSNETIVAEQGTSFFGASTIFLKSNSRFIGQPLWGSIGYTFPAALGSQIADKESRHLLFIGDGSLQLTVQELGLAIREKLNPICFIINNDGYTVEREIHGPTQPYNDIPMWNYSKLPETFGATEDRVVSKIVRTENEFVSVMKEAQADVNRMYWIELVLEKEDAPKLLKKMGKLFAEQNK

SEQ ID NO: 177 - DNA, 1641 bp, Artificial Sequence
  Variant of branched-chain keto acid decarboxylase (kdcA) from Lactococcus lactis
atgtacaccgttggcgactatctgctggaccgtctgcatgaactgggaattgaagaaatctttggcgtgccgggcgattacaatctgcaattcctggatcaaatcattgcgcgcgaagatatgagatggattggtaacgcgaatgaactgaatgcgagctacatggctgatggctatgcacgtacgaagaaggcggcggcgttcctgacgaccttcggtgttggtgaactgagcgcaatcaatgggttggcgggcagctatgcagagaacctgccagtcgtggaaatcgttgggagtccgacctcgaaggtgcagaacgatggcaagttcgttcatcacaccctggccgacggcgacttcaagcacttcatgaagatgcacgaaccggtcaccgctgcacgtacactgctgaccgccgagaacgcgaccacagagattgaccgcgtgctgagccaactgctgaaagaacgtaaacctgtgtacatcaacctgccggttgatgtcgccgcggcgaaagccgagaaaccagctctgagcctggagaaagaaagcagcacgttaaacaccacagaacaggtgatcctgtcgaagatcgaagaaagcctgaagaacgcccagaaaccggtcgtgatcgctgggcacgaggtgattagcttcggtctggagaagacggttacgcagtttgtgagtgaaaccaaactgccgattactaccctgaactttggcaaatcggctgtggatgaatccctgccgtccttcctgggtatctacaatggtaaactgagcgagattagcctcaagaactttgtggaaagcgcagacttcatcctgatgcttggtgtgaaactgacggatatcagtacgggcgcgtttacgcaccatctggacgagaacaagatgattagcctgaacattgatgaaggcatcatcttcaacaaagtcgtagaagacttcgatttcagcgcggttgttagcagcctgagcgagctgaaaggcattgaatacgaaggtcaatacattgataaacagtacgaagagttcattccgagcagcgcaccactgagccaagaccgtctgtggcaagcagtagaatctctgacacagtccaatgaaaccattgtggcggaacagggcacgtcgttcttcggtgcctccaccatcttcctgaagagcaattcacgcttcatcggtcagccgctttggggcagcatcggctatacgtttccggcagcactgggatcacagattgcggataaggaaagtcgccatctgctgttcattggtgatggtagcctgcaactgaccgtgagcgagctgggcctggcgatccgtgagaaactgaacccgatttgtttcatcatcaacaacgatggctataccgtagagcgcgagattcatgggcctacacagccgtacaatgacatcccgatgtggaactatagcaaactgccggaaacctttggcgcgacggaagatcgcgtagttagcaagatcgttcgcacagagaacgagtttgtgagtgtcatgaaggaagcgcaggccgatgttaaccgcatgtattggattgaactggttctggagaaagaagatgcaccgaaactgctgaagaagatggggaagctgtttgcagaacagaacaaa

SEQ ID NO: 178 - protein, 547 aa, Artificial Sequence
  Variant of branched-chain keto acid decarboxylase (kdcA) from Lactococcus lactis
MYTVGDYLLDRLHELGIEEIFGVPGDYNLQFLDQIIAREDMRWIGNANELNASYMADGYARTKKAAAFLTTFGVGELSAINGLAGSYAENLPVVEIVGSPTSKVQNDGKFVHHTLADGDFKHFMKMHEPVTAARTLLTAENATTEIDRVLSQLLKERKPVYINLPVDVAAAKAEKPALSLEKESSTLNTTEQVILSKIEESLKNAQKPVVIAGHEVISFGLEKTVTQFVSETKLPITTLNFGKSAVDESLPSFLGIYNGKLSEISLKNFVESADFILMLGVKLTDISTGAFTHHLDENKMISLNIDEGIIFNKVVEDFDFSAVVSSLSELKGIEYEGQYIDKQYEEFIPSSAPLSQDRLWQAVESLTQSNETIVAEQGTSFFGASTIFLKSNSRFIGQPLWGSIGYTFPAALGSQIADKESRHLLFIGDGSLQLTVSELGLAIREKLNPICFIINNDGYTVEREIHGPTQPYNDIPMWNYSKLPETFGATEDRVVSKIVRTENEFVSVMKEAQADVNRMYWIELVLEKEDAPKLLKKMGKLFAEQNK

SEQ ID NO: 179 - DNA, 1641 bp, Artificial Sequence
  Variant of branched-chain keto acid decarboxylase (kdcA) from Lactococcus lactis
atgtacaccgttggcgactatctgctggaccgtctgcatgaactgggaattgaagaaatctttggcgtgccgggcgattacaatctgcaattcctggatcaaatcattgcgcgcgaagatatgaaatggattggtaacgcgaatgaactgaatgcgagctacatggctgatggctatgcacgtacgaagaaggcggcggcgttcctgacgaccttcggtgttggtgaactgagcgcaatcaatgggttggcgggcagctatgcagagaacctgccagtcgtggaaatcgttgggagtccgacctcgaaggtgcagaacgatggcaagttcgttcatcacaccctggccgacggcgacttcaagcacttcatgaagatgcacgaaccggtcaccgctgcacgtacactgctgaccgccgagaacgcgaccacagagattgaccgcgtgctgagccaactgctgaaagaacgtaaacctgtgtacatcaacctgccggttgatgtcgccgcggcgaaagccgagaaaccagctctgagcctggagaaagaaagcagcacgttaaacaccacagaacaggtgatcctgtcgaagatcgaagaaagcctgaagaacgcccagaaaccggtcgtgatcgctgggcacgaggtgattagcttcggtctggagaagacggttacgcagtttgtgagtgaaacccacctgccgattactaccctgaactttggcaaatcggctgtggatgaatccctgccgtccttcctgggtatctacaatggtaaactgagcgagattagcctcaagaactttgtggaaagcgcagacttcatcctgatgcttggtgtgaaactgacggatatcagtacgggcgcgtttacgcaccatctggacgagaacaagatgattagcctgaacattgatgaaggcatcatcttcaacaaagtcgtagaagacttcgatttccgtgcggttgtttttagcctgaacgagctgcttggcattgaatacgaaggtcaatacattgataagcagtacgaagagttcgacccgagcagcgcaccactgttgcaagaccgtctgtggcaagcagtagaatctctgacacagtccaatgaaaccattgtggcggaacagggcacgtcgttcttcggtgcctccaccatcttcctgaagagcaattcacgcttcatcggtcagccgctttggggcagcatcggctatacgtttccggcagcactgggatcacagattgcggataaggaaagtcgccatctgctgttcattggtgatggtagcctgcaactgaccgtgcaggagctgggcctggcgatccgtgagaaactgaacccgatttgtttcatcatcaacaacgatggctataccgtagagcgcgagattcatgggcctacacagccgtacaatgacatcccgatgtggaactatagcaaactgccggaaacctttggcgcgacggaagatcgcgtagttagcaagatcgttcgcacagagaacgagtttgtgagtgtcatgaaagaagcgcaggccgatgttaaccgcatgtattggattgaactggttctggagaaagaagatgcaccgaaactgctgaagaagatggggaagctgtttgcagaacagaacaaa

SEQ ID NO: 180 - protein, 547 aa, Artificial Sequence
  Variant of branched-chain keto acid decarboxylase (kdcA) from Lactococcus lactis
MYTVGDYLLDRLHELGIEEIFGVPGDYNLQFLDQIIAREDMKWIGNANELNASYMADGYARTKKAAAFLTTFGVGELSAINGLAGSYAENLPVVEIVGSPTSKVQNDGKFVHHTLADGDFKHFMKMHEPVTAARTLLTAENATTEIDRVLSQLLKERKPVYINLPVDVAAAKAEKPALSLEKESSTLNTTEQVILSKIEESLKNAQKPVVIAGHEVISFGLEKTVTQFVSETHLPITTLNFGKSAVDESLPSFLGIYNGKLSEISLKNFVESADFILMLGVKLTDISTGAFTHHLDENKMISLNIDEGIIFNKVVEDFDFRAVVFSLNELLGIEYEGQYIDKQYEEFDPSSAPLLQDRLWQAVESLTQSNETIVAEQGTSFFGASTIFLKSNSRFIGQPLWGSIGYTFPAALGSQIADKESRHLLFIGDGSLQLTVQELGLAIREKLNPICFIINNDGYTVEREIHGPTQPYNDIPMWNYSKLPETFGATEDRVVSKIVRTENEFVSVMKEAQADVNRMYWIELVLEKEDAPKLLKKMGKLFAEQNK

SEQ ID NO: 181 - DNA, 1641 bp, Artificial Sequence
  Variant of branched-chain keto acid decarboxylase (kdcA) from Lactococcus lactis
atgtacaccgttggcgactatctgctggaccgtctgcatgaactgggaattgaagaaatctttggcgtgccgggcgattacaatctgcaattcctggatcaaatcattgcgcgcgaagatatgaaatggattggtaacgcgaatgaactgaatgcgagctacatggctgatggctatgcacgtacgaagaaggcggcggcgttcctgacgaccttcggtgttggtgaactgagcgcaatcaatgggttggcgggcagctatgcagagaacctgccagtcgtggaaatcgttgggagtccgacctcgaaggtgcagaacgatggcaagttcgttcatcacaccctggccgacggcgacttcaagcacttcaggaagatgcacgaaccggtcaccgctgcacgtacacatctgaccgccgagaacgcgaccacagagattgaccgcgtgctgagccaactgctgaaagaacgtaaacctgtgtacatcaacctgccggttgatgtcgccgcggcgaaagccgagaaaccagctctgagcctggagaaagaaagcagcacgttaaacaccacagaacaggtgatcctgtcgaagatcgaagaaagcctgaagaacgcccagaaaccggtcgtgatcgctgggcacgaggtgattagcttcggtctggagaagacggttacgcagtttgtgagtgaaaccaaactgccgattactaccctgaactttggcaaatcggctgtggatgaatccctgccgtccttcctgggtatctacaatggtaaactgagcgagattagcctcaagaactttgtggaaagcgcagacttcatcctgatgcttggtgtgaaactgacggatatcagtacgggcgcgtttacgcaccatctggacgagaacaagatgattagcctgaacattgatgaaggcatcatcttcaacaaagtcgtagaagacttcgatttccgcgcggttgttagcagcctgagcgagctgaacggcattgaatacgaaggtcaatacattgataaacagtacgaagagttcattccgagcagcgcaccactgtcgcaagaccgtctgtggcaagcagtagaatctctgacacagtccaatgaaaccattgtggcggaacagggcacgtcgttcttcggtgcctccaccatcttcctgaagagcaattcacgcttcatcggtcagccgctttggggcagcatcggctatacgtttccggcagcactgggatcacagattgcggataaggaaagtcgccatctgctgttcattggtgatggtagcctgcaactgaccgtgcaagagctgggcctggcgatccgtgagaaactgaacccgatttgtttcatcatcaacaacgatggctataccgtagagcgcgagattcatgggcctacacagccgtacaatgacatcccgatgtggaactatagcaaactgccggaaacctttggcgcgacggaagatcgcgtagttagcaagatcgttcgcacagagaacgagtttgtgagtgtcatgaaggaagcgcaggccgatgttaaccgcatgtattggattgaactggttctggagaaagaagatgcaccgaaactgctgaagaagatggggaagctgtttgcagaacagaacaaa

SEQ ID NO: 182 - protein, 547 aa, Artificial Sequence
  Variant of branched-chain keto acid decarboxylase (kdcA) from Lactococcus lactis
MYTVGDYLLDRLHELGIEEIFGVPGDYNLQFLDQIIAREDMKWIGNANELNASYMADGYARTKKAAAFLTTFGVGELSAINGLAGSYAENLPVVEIVGSPTSKVQNDGKFVHHTLADGDFKHFRKMHEPVTAARTHLTAENATTEIDRVLSQLLKERKPVYINLPVDVAAAKAEKPALSLEKESSTLNTTEQVILSKIEESLKNAQKPVVIAGHEVISFGLEKTVTQFVSETKLPITTLNFGKSAVDESLPSFLGIYNGKLSEISLKNFVESADFILMLGVKLTDISTGAFTHHLDENKMISLNIDEGIIFNKVVEDFDFRAVVSSLSELNGIEYEGQYIDKQYEEFIPSSAPLSQDRLWQAVESLTQSNETIVAEQGTSFFGASTIFLKSNSRFIGQPLWGSIGYTFPAALGSQIADKESRHLLFIGDGSLQLTVQELGLAIREKLNPICFIINNDGYTVEREIHGPTQPYNDIPMWNYSKLPETFGATEDRVVSKIVRTENEFVSVMKEAQADVNRMYWIELVLEKEDAPKLLKKMGKLFAEQNK

SEQ ID NO: 183 - DNA, 1641 bp, Artificial Sequence
  Variant of branched-chain keto acid decarboxylase (kdcA) from Lactococcus lactis
atgtacaccgttggcgactatctgctggaccgtctgcatgaactgggaattgaagaaatctttggcgtgccgggcgattacaatctgcaattcctggatcaaatcattgcgcgcgaagatatgaaatggattggtaacgcgaatgaactgaatgcgagctacatggctgatggctatgcacgtacgaagaaggcggcggcgttcctgacgaccttcggtgttggtgaactgagcgcaatcaatgggttggcgggcagctatgcagagaacctgccagtcgtggaaatcgttgggagtccgacctcgaaggtgcagaaccgcggcaagttcgttcatcacaccctggccgacggcgacttcaagcacttcatgaagatgcacgaaccggtcaccgctgcacgtacactgctgaccgccgagaacgcgaccacagagattgaccgcgtgctgagccaactgctgaaagaacgtaaacctgtgtacatcaacctgccggttgatgtcgccgcggcgaaagccgagaaaccagctctgagcctggagaaagaaagcagcacgttaaacaccacagaacaggtgatcctgtcgaagatcgaagaaagcctgaagaacgcccagaaaccggtcgtgatcgctgggcacgaggtgattagcttcggtctggagaagacggttacgcagtttgtgagtgaaaccaaactgccgattactaccctgaactttggcaaatcggctgtggatgaatccctgccgtccttcctgggtatctacaatggtaaactgagcgagattagcctcaagaactttgtggaaagcgcagacttcatcctgatgcttggtgtgaaactgacggatatcagtacgggcgcgtttacgcaccatctggacgagaacaagatgattagcctgaacattgatgaaggcatcatcttcaacaaagtcgtagaagacttcgatttccgtgcggttgttagcagcctgagcgagctgaaaggcattgaatacgaaggtcaatacattgataagcagtacgaagagttcgacccgagcagcgcaccactgtcgcaagaccgtctgtggcaagcagtagaatctctgacacagtccaatgaaaccattgtggcggaacagggcacgtcgttcttcggtgcctccaccatcccactgaagagcaattcacgcttcatcggtcagccgctttggggcagcatcggctatacgtttccggcagcactgggatcacagattgcggataaggaaagtcgccatctgctgttcattggtgatggtagcctgcaactgaccgtgcaggagctgggcctggcgatccgtgagaaactgaacccgatttgtttcatcatcaacaacgatggctataccgtagagcgcgagattcatgggcctacacagccgtacaatgacatcccgatgtggaactatagcaaactgccggaaacctttggcgcgacggaagatcgcgtagttagcaagatcgttcgcacagagaacgagtttgtgagtgtcatgaaagaagcgcaggccgatgttaaccgcatgtattggattgaactggttctggagaaagaagatgcaccgaaactgctgaagaagatggggaagctgtttgcagaacagaacaaa

SEQ ID NO: 184 - protein, 547 aa, Artificial Sequence
  Variant of branched-chain keto acid decarboxylase (kdcA) from Lactococcus lactis
MYTVGDYLLDRLHELGIEEIFGVPGDYNLQFLDQIIAREDMKWIGNANELNASYMADGYARTKKAAAFLTTFGVGELSAINGLAGSYAENLPVVEIVGSPTSKVQNRGKFVHHTLADGDFKHFMKMHEPVTAARTLLTAENATTEIDRVLSQLLKERKPVYINLPVDVAAAKAEKPALSLEKESSTLNTTEQVILSKIEESLKNAQKPVVIAGHEVISFGLEKTVTQFVSETKLPITTLNFGKSAVDESLPSFLGIYNGKLSEISLKNFVESADFILMLGVKLTDISTGAFTHHLDENKMISLNIDEGIIFNKVVEDFDFRAVVSSLSELKGIEYEGQYIDKQYEEFDPSSAPLSQDRLWQAVESLTQSNETIVAEQGTSFFGASTIPLKSNSRFIGQPLWGSIGYTFPAALGSQIADKESRHLLFIGDGSLQLTVQELGLAIREKLNPICFIINNDGYTVEREIHGPTQPYNDIPMWNYSKLPETFGATEDRVVSKIVRTENEFVSVMKEAQADVNRMYWIELVLEKEDAPKLLKKMGKLFAEQNK

SEQ ID NO: 185 - DNA, 1641 bp, Artificial Sequence
  Variant of branched-chain keto acid decarboxylase (kdcA) from Lactococcus lactis
atgtacaccgttggcgactatctgctggaccgtctgcatgaactgggaattgaagaaatctttggcgtgccgggcgattacaatctgcaattcctggatcaaatcattgcgcgcgaagatatgaaatggattggtaacgcgaatgaactgaatgcgagctacatggctgatggctatgcacgtacgaagaaggcggcggcgttcctgacgaccttcggtgttggtgaactgagcgcaatcaatgggttggcgggcagctatgcagagaacctgccagtcgtggaaatcgttgggagtccgacctcgaaggtgcagaacgatggcaagttcgttcatcacaccctggccgacggcgacttcaagcacttcatgaagatgcacgaaccggtcaccgctgcacgtacactgctgaccgccgagaacgcgaccacagagattgaccgcgtgctgagccaactgctgaaagaacgtaaacctgtgtacatcaacctgccggttgatgtcgccgcggcgaaagccgagaaaccagctctgagcctggagaaagaaagcagcacgttaaacaccacagaacaggtgatcctgtcgaagatcgaagaaagcctgaagaacgcccagaaaccggtcgtgatcgctgggcacgaggtgattagcttcggtctggagaagacggttacgcagtttgtgagtgaaaccaaactgccgattactaccctgaactttggcaaatcggctgtggatgaatccctgccgtccttcctgggtatctacaatggtaaactgagcgagattagcctcaagaactttgtggaaagcgcagacttcatcctgatgcttggtgtgaaactgacggatatcagtacgggcgcgtttacgcaccatctggacgagaacaagatgattagcctgaacattgatgaaggcatcatcttcaacaaagtcgtagaagacttcgatttccgtgcggttgtttttagcctgaacgagctgcttggcattgaatacgaaggtcaatacattgataagcagtacgaagagttcgacccgagcagcgcaccactgttgcaagaccgtctgtggcaagcagtagaatctctgacacagtccaatgaaaccattgtggcggaacagggcacgtcgttcttcggtgcctccaccatcccactgaagagcaattcacgcttcatcggtcagccgctttggggcagcatcggctatacgtttccggcagcactgggatcacagattgcggataaggaaagtcgccatctgctgttcattggtgatggtagcctgcaactgaccgtgcaggagctgggcctggcgatccgtgagaaactgaacccgatttgtttcatcatcaacaacgatggctataccgtagagcgcgagattcatgggcctacacagccgtacaatgacatcccgatgtggaactatagcaaactgccggaaacctttggcgcgacggaagatcgcgtagttagcaagatcgttcgcacagagaacgagtttgtgagtgtcatgaaagaagcgcaggccgatgttaaccgcatgtattggattgaactggttctggagaaagaagatgcaccgaaactgctgaagaagatggggaagctgtttgcagaacagaacaaa

SEQ ID NO: 186 - protein, 547 aa, Artificial Sequence
  Variant of branched-chain keto acid decarboxylase (kdcA) from Lactococcus lactis
MYTVGDYLLDRLHELGIEEIFGVPGDYNLQFLDQIIAREDMKWIGNANELNASYMADGYARTKKAAAFLTTFGVGELSAINGLAGSYAENLPVVEIVGSPTSKVQNDGKFVHHTLADGDFKHFMKMHEPVTAARTLLTAENATTEIDRVLSQLLKERKPVYINLPVDVAAAKAEKPALSLEKESSTLNTTEQVILSKIEESLKNAQKPVVIAGHEVISFGLEKTVTQFVSETKLPITTLNFGKSAVDESLPSFLGIYNGKLSEISLKNFVESADFILMLGVKLTDISTGAFTHHLDENKMISLNIDEGIIFNKVVEDFDFRAVVFSLNELLGIEYEGQYIDKQYEEFDPSSAPLLQDRLWQAVESLTQSNETIVAEQGTSFFGASTIPLKSNSRFIGQPLWGSIGYTFPAALGSQIADKESRHLLFIGDGSLQLTVQELGLAIREKLNPICFIINNDGYTVEREIHGPTQPYNDIPMWNYSKLPETFGATEDRVVSKIVRTENEFVSVMKEAQADVNRMYWIELVLEKEDAPKLLKKMGKLFAEQNK

SEQ ID NO: 187 - DNA, 1641 bp, Artificial Sequence
  Variant of branched-chain keto acid decarboxylase (kdcA) from Lactococcus lactis
atgtacaccgttggcgactatctgctggaccgtctgcatgaactgggaattgaagaaatctttggcgtgccgggcgattacaatctgcaattcctggatcaaatcattgcgcgcgaagatatgaaatggattggtaacgcgaatgaactgaatgcgagctacatggctgatggctatgcacgtacgaagaaggcggcggcgttcctgacgaccttcggtgttggtgaactgagcgcaatcaatgggttggcgggcagctatgcagagaacctgccagtcgtggaaatcgttgggagtccgacctcgaaggtgcagaacgatggcaagttcgttcatcacaccctggccgacggcgacttcaagcacttcatgaagatgcacgaaccggtcaccgctgcacgtacacatctgaccgccgagaacgcgaccacagagattgaccgcgtgctgagccaactgctgaaagaacgtaaacctgtgtacatcaacctgccggttgatgtcgccgcggcgaaagccgagaaaccagctctgagcctggagaaagaaagcagcacgttaaacaccacagaacaggtgatcctgtcgaagatcgaagaaagcctgaagaacgcccagaaaccggtcgtgatcgctgggcacgaggtgattagcttcggtctggagaagacggttacgcagtttgtgagtgaaaccaaactgccgattactaccctgaactttggcaaatcggctgtggatgaatccctgccgtccttcctgggtatctacaatggtaaactgagcgagattagcctcaagaactttgtggaaagcgcagacttcatcctgatgcttggtgtgaaactgacggatatcagtacgggcgcgtttacgcaccatctggacgagaacaagatgattagcctgaacattgatgaaggcatcatcttcaacaaagtcgtagaagacttcgatttccgtgcggttgttagcagcctgagcgagctgaaaggcattgaatacgaaggtcaatacattgataagcagtacgaagagttcattccgagcagcgcaccactgtcgcaagaccgtctgtggcaagcagtagaatctctgacacagtccaatgaaaccattgtggcggaacagggcacgtcgttcttcggtgcctccaccatcttcctgaagagcaattcacgcttcatcggtcagccgctttggggcagcatcggctatacgtttccggcagcactgggatcacagattgcggataaggaaagtcgccatctgctgttcattggtgatggtagcctgcaactgaccgtgagcgagctgggcctggcgatccgtgagaaactgaacccgatttgtttcatcatcaacaacgatggctataccgtagagcgcgagattcatgggcctacacagccgtacaatgacatcccgatgtggaactatagcaaactgccggaaacctttggcgcgacggaagatcgcgtagttagcaagatcgttcgcacagagaacgagtttgtgagtgtcatgaaagaagcgcaggccgatgttaaccgcatgtattggattgaactggttctggagaaagaagatgcaccgaaactgctgaagaagatggggaagctgtttgcagaacagaacaaa

SEQ ID NO: 188 - protein, 547 aa, Artificial Sequence
  Variant of branched-chain keto acid decarboxylase (kdcA) from Lactococcus lactis
MYTVGDYLLDRLHELGIEEIFGVPGDYNLQFLDQIIAREDMKWIGNANELNASYMADGYARTKKAAAFLTTFGVGELSAINGLAGSYAENLPVVEIVGSPTSKVQNDGKFVHHTLADGDFKHFMKMHEPVTAARTHLTAENATTEIDRVLSQLLKERKPVYINLPVDVAAAKAEKPALSLEKESSTLNTTEQVILSKIEESLKNAQKPVVIAGHEVISFGLEKTVTQFVSETKLPITTLNFGKSAVDESLPSFLGIYNGKLSEISLKNFVESADFILMLGVKLTDISTGAFTHHLDENKMISLNIDEGIIFNKVVEDFDFRAVVSSLSELKGIEYEGQYIDKQYEEFIPSSAPLSQDRLWQAVESLTQSNETIVAEQGTSFFGASTIFLKSNSRFIGQPLWGSIGYTFPAALGSQIADKESRHLLFIGDGSLQLTVSELGLAIREKLNPICFIINNDGYTVEREIHGPTQPYNDIPMWNYSKLPETFGATEDRVVSKIVRTENEFVSVMKEAQADVNRMYWIELVLEKEDAPKLLKKMGKLFAEQNK

SEQ ID NO: 189 - DNA, 1641 bp, Artificial Sequence
  Variant of branched-chain keto acid decarboxylase (kdcA) from Lactococcus lactis
atgtacaccgttggcgactatctgctggaccgtctgcatgaactgggaattgaagaaatctttggcgtgccgggcgattacaatctgcaattcctggatcaaatcattgcgcgcgaagatatgagatggattggtaacgcgaatgaactgaatgcgagctacatggctgatggctatgcacgtacgaagaaggcggcggcgttcctgacgaccttcggtgttggtgaactgagcgcaatcaatgggttggcgggcagctatgcagagaacctgccagtcgtggaaatcgttgggagtccgacctcgaaggtgcagaacgatggcaagttcgttcatcacaccctggccgacggcgacttcaagcacttcatgaagatgcacgaaccggtcaccgctgcacgtacacatctgaccgccgagaacgcgaccacagagattgaccgcgtgctgagccaactgctgaaagaacgtaaacctgtgtacatcaacctgccggttgatgtcgccgcggcgaaagccgagaaaccagctctgagcctggagaaagaaagcagcacgttaaacaccacagaacaggtgatcctgtcgaagatcgaagaaagcctgaagtgggcccagaaaccggtcgtgatcgctgggcacgaggtgattagcttcggtctggagaagacggttacgcagtttgtgagtgaaaccaaactgccgattactaccctgaactttggcaaatcggctgtggatgaatccctgccgtccttcctgggtatctacaatggtaaactgagcgagattagcctcaagaactttgtggaaagcgcagacttcatcctgatgcttggtgtgaaactgacggatatcagtacgggcgcgtttacgcaccatctggacgagaacaagatgattagcctgaacattgatgaaggcatcatcttcaacaaagtcgtagaagacttcgatttcagcgcggttgttagcagcctgttggagctgaacggcattgaatacgaaggtcaatacattgataagcagtacgaagagttcattccgagcagcgcaccactgttgcaagaccgtctgtggcaagcagtagaatctctgacacagtccaatgaaaccattgtggcggaacagggcacgtcgttcttcggtgcctccaccatcttcctgaagagcaattcacgcttcatcggtcagccgctttggggcagcatcggctatacgtttccggcagcactgggatcacagattgcggataaggaaagtcgccatctgctgttcattggtgatggtagcctgcaactgaccgtgcaagagctgggcctggcgatccgtgagaaactgaacccgatttgtttcatcatcaacaacgatggctataccgtagagcgcgagattcatgggcctacacagccgtacaatgacatcccgatgtggaactatagcaaactgccggaaacctttggcgcgacggaagatcgcgtagttagcaagatcgttcgcacagagaacgagtttgtgagtgtcatgaaggaagcgcaggccgatgttaaccgcatgtattggattgaactggttctggagaaagaagatgcaccgaaactgctgaagaagatggggaagctgtttgcagaacagaacaaa

SEQ ID NO: 190 - protein, 547 aa, Artificial Sequence
  Variant of branched-chain keto acid decarboxylase (kdcA) from Lactococcus lactis
MYTVGDYLLDRLHELGIEEIFGVPGDYNLQFLDQIIAREDMRWIGNANELNASYMADGYARTKKAAAFLTTFGVGELSAINGLAGSYAENLPVVEIVGSPTSKVQNDGKFVHHTLADGDFKHFMKMHEPVTAARTHLTAENATTEIDRVLSQLLKERKPVYINLPVDVAAAKAEKPALSLEKESSTLNTTEQVILSKIEESLKWAQKPVVIAGHEVISFGLEKTVTQFVSETKLPITTLNFGKSAVDESLPSFLGIYNGKLSEISLKNFVESADFILMLGVKLTDISTGAFTHHLDENKMISLNIDEGIIFNKVVEDFDFSAVVSSLLELNGIEYEGQYIDKQYEEFIPSSAPLLQDRLWQAVESLTQSNETIVAEQGTSFFGASTIFLKSNSRFIGQPLWGSIGYTFPAALGSQIADKESRHLLFIGDGSLQLTVQELGLAIREKLNPICFIINNDGYTVEREIHGPTQPYNDIPMWNYSKLPETFGATEDRVVSKIVRTENEFVSVMKEAQADVNRMYWIELVLEKEDAPKLLKKMGKLFAEQNK

SEQ ID NO: 191 - DNA, 1641 bp, Artificial Sequence
  Variant of branched-chain keto acid decarboxylase (kdcA) from Lactococcus lactis
atgtacaccgttggcgactatctgctggaccgtctgcatgaactgggaattgaagaaatctttggcgtgccgggcgattacaatctgcaattcctggatcaaatcattgcgcgcgaagatatgaaatggattggtaacgcgaatgaactgaatgcgagctacatggctgatggctatgcacgtacgaagaaggcggcggcgttcctgacgaccttcggtgttggtgaactgagcgcaatcaatgggttggcgggcagctatgcagagaacctgccagtcgtggaaatcgttgggagtccgacctcgaaggtgcagaaccgcggcaagttcgttcatcacaccctggccgacggcgacttcaagcacttcatgaagatgcacgaaccggtcaccgctgcacgtacactgctgaccgccgagaacgcgaccacagagattgaccgcgtgctgagccaactgctgaaagaacgtaaacctgtgtacatcaacctgccggttgatgtcgccgcggcgaaagccgagaaaccagctctgagcctggagaaagaaagcagcacgttaaacaccacagaacaggtgatcctgtcgaagatcgaagaaagcctgaagaacgcccagaaaccggtcgtgatcgctgggcacgaggtgattagcttcggtctggagaagacggttacgcagtttgtgagtgaaaccaaactgccgattactaccctgaactttggcaaatcggctgtggatgaatccctgccgtccttcctgggtatctacaatggtaaactgagcgagattagcctcaagaactttgtggaaagcgcagacttcatcctgatgcttggtgtgaaactgacggatatcagtacgggcgcgtttacgcaccatctggacgagaacaagatgattagcctgaacattgatgaaggcatcatcttcaacaaagtcgtagaagacttcgatttccgtgcggttgtttttagcctgagcgagctgcttggcattgaatacgaaggtcaatacattgataagcagtacgaagagttcattccgagcagcgcaccactgtcgcaagaccgtctgtggcaagcagtagaatctctgacacagtccaatgaaaccattgtggcggaacagggcacgtcgttcttcggtgcctccaccatcttcctgaagagcaattcacgcttcatcggtcagccgctttggggcagcatcggctatacgtttccggcagcactgggatcacagattgcggataaggaaagtcgccatctgctgttcattggtgatggtagcctgcaactgaccgtgcaggagctgggcctggcgatccgtgagagactgaacccgatttgtttcatcatcaacaacgatggctataccgtagagcgcgagattcatgggcctacacagccgtacaatgacatcccgatgtggaactatagcaaactgccggaaacctttggcgcgacggaagatcgcgtagttagcaagatcgttcgcacagagaacgagtttgtgagtgtcatgaaagaagcgcaggccgatgttaaccgcatgtattggattgaactggttctggagaaagaagatgcaccgaaactgctgaagaagatggggaagctgtttgcagaacagaacaaa

SEQ ID NO: 192 - protein, 547 aa, Artificial Sequence
  Variant of branched-chain keto acid decarboxylase (kdcA) from Lactococcus lactis
MYTVGDYLLDRLHELGIEEIFGVPGDYNLQFLDQIIAREDMKWIGNANELNASYMADGYARTKKAAAFLTTFGVGELSAINGLAGSYAENLPVVEIVGSPTSKVQNRGKFVHHTLADGDFKHFMKMHEPVTAARTLLTAENATTEIDRVLSQLLKERKPVYINLPVDVAAAKAEKPALSLEKESSTLNTTEQVILSKIEESLKNAQKPVVIAGHEVISFGLEKTVTQFVSETKLPITTLNFGKSAVDESLPSFLGIYNGKLSEISLKNFVESADFILMLGVKLTDISTGAFTHHLDENKMISLNIDEGIIFNKVVEDFDFRAVVFSLSELLGIEYEGQYIDKQYEEFIPSSAPLSQDRLWQAVESLTQSNETIVAEQGTSFFGASTIFLKSNSRFIGQPLWGSIGYTFPAALGSQIADKESRHLLFIGDGSLQLTVQELGLAIRERLNPICFIINNDGYTVEREIHGPTQPYNDIPMWNYSKLPETFGATEDRVVSKIVRTENEFVSVMKEAQADVNRMYWIELVLEKEDAPKLLKKMGKLFAEQNK

SEQ ID NO: 193 - DNA, 1641 bp, Artificial Sequence
  Variant of branched-chain keto acid decarboxylase (kdcA) from Lactococcus lactis
atgtacaccgttggcgactatctgctggaccgtctgcatgaactgggaattgaagaaatctttggcgtgccgggcgattacaatctgcaattcctggatcaaatcattgcgcgcgaagatatgaaatggattggtaacgcgaatgaactgaatgcgagctacatggctgatggctatgcacgtacgaagaaggcggcggcgttcctgacgaccttcggtgttggtgaactgagcgcaatcaatgggttggcgggcagctatgcagagaacctgccagtcgtggaaatcgttgggagtccgacctcgaaggtgcagaacgatggcaagttcgttcatcacaccctggccgacggcgacttcaagcacttcatgaagatgcacgaaccggtcaccgctgcacgtacactgctgaccgccgagaacgcgaccacagagattgaccgcgtgctgagccaactgctgaaagaacgtaaacctgtgtacatcaacctgccggttgatgtcgccgcggcgaaagccgagaaaccagctctgagcctggagaaagaaagcagcacgttaaacaccacagaacaggtgatcctgtcgaagatcgaagaaagcctgaagaacgcccagaaaccggtcgtgatcgctgggcacgaggtgattagcttcggtctggagaagacggttacgcagtttgtgagtgaaaccaaactgccgattactaccctgaactttggcaaatcggctgtggatgaatccctgccgtccttcctgggtatctacaatggtagcctgagcgagattagcctcaagaactttgtggaaagcgcagacttcatcctgatgcttggtgtgaaactgacggatatcagtacgggcgcgtttacgcaccatctggacgagaacaagatgattagcctgaacattgatgaaggcatcatcttcaacaaagtcgtagaagacttcgatttccgtgcggttgtttttagcctgagcgagctgcttggcattgaatacgaaggtcaatacattgataagcagtacgaagagttcattccgagcagcgcaccactgtcgcaagaccgtctgtggcaagcagtagaatctctgacacagtccaatgaaaccattgtggcggaacagggcacgtcgttcttcggtgcctccaccatcttcctgaagagcaattcacgcttcatcggtcagccgctttggggcagcatcggctatacgtttccggcagcactgggatcacagattgcggataaggaaagtcgccatctgctgttcattggtgatggtagcctgcaactgaccgtgcaggagctgggcctggcgatccgtgagagactgaacccgatttgtttcatcatcaacaacgatggctataccgtagagcgcgagattcatgggcctacacagccgtacaatgacatcccgatgtggaactatagcaaactgccggaaacctttggcgcgacggaagatcgcgtagttagcaagatcgttcgcacagagaacgagtttgtgagtgtcatgaaagaagcgcaggccgatgttaaccgcatgtattggattgaactggttctggagaaagaagatgcaccgaaactgctgaagaagatggggaagctgtttgcagaacagaacaaa

SEQ ID NO: 194 - protein, 547 aa, Artificial Sequence
  Variant of branched-chain keto acid decarboxylase (kdcA) from Lactococcus lactis
MYTVGDYLLDRLHELGIEEIFGVPGDYNLQFLDQIIAREDMKWIGNANELNASYMADGYARTKKAAAFLTTFGVGELSAINGLAGSYAENLPVVEIVGSPTSKVQNDGKFVHHTLADGDFKHFMKMHEPVTAARTLLTAENATTEIDRVLSQLLKERKPVYINLPVDVAAAKAEKPALSLEKESSTLNTTEQVILSKIEESLKNAQKPVVIAGHEVISFGLEKTVTQFVSETKLPITTLNFGKSAVDESLPSFLGIYNGSLSEISLKNFVESADFILMLGVKLTDISTGAFTHHLDENKMISLNIDEGIIFNKVVEDFDFRAVVFSLSELLGIEYEGQYIDKQYEEFIPSSAPLSQDRLWQAVESLTQSNETIVAEQGTSFFGASTIFLKSNSRFIGQPLWGSIGYTFPAALGSQIADKESRHLLFIGDGSLQLTVQELGLAIRERLNPICFIINNDGYTVEREIHGPTQPYNDIPMWNYSKLPETFGATEDRVVSKIVRTENEFVSVMKEAQADVNRMYWIELVLEKEDAPKLLKKMGKLFAEQNK

SEQ ID NO: 195 - DNA, 1641 bp, Artificial Sequence
  Variant of branched-chain keto acid decarboxylase (kdcA) from Lactococcus lactis
atgtacaccgttggcgactatctgctggaccgtctgcatgaactgggaattgaagaaatctttggcgtgccgggcgattacaatctgcaattcctggatcaaatcattgcgcgcgaagatatgaaatggattggtaacgcgaatgaactgaatgcgagctacatggctgatggctatgcacgtacgaagaaggcggcggcgttcctgacgaccttcggtgttggtgaactgagcgcaatcaatgggttggcgggcagctatgcagagaacctgccagtcgtggaaatcgttgggagtccgacctcgaaggtgcagaacgatggcaagttcgttcatcacaccctggccgacggcgacttcaagcacttcatgaagatgcacgaaccggtcaccgctgcacgtacactgctgaccgccgagaacgcgaccacagagattgaccgcgtgctgagccaactgctgaaagaacgtaaacctgtgtacatcaacctgccggttgatgtcgccgcggcgaaagccgagaaaccagctctgagcctggagaaagaaagcagcacgttaaacaccacagaacaggtgatcctgtcgaagatcgaagaaagcctgaagaacgcccagaaaccggtcgtgatcgctgggcacgaggtgattagcttcggtctggagaagacggttacgcagtttgtgagtgaaaccaaactgccgattactaccctgaactttggcaaatcggctgtggatgaatccctgccgtccttcctgggtatctacaatggtaaactgagcgagattagcctcaagaactttgtggaaagcgcagacttcatcctgatgcttggtgtgaaactgacggatatcagtacgggcgcgtttacgcaccatctggacgagaacaagatgattagcctgaacattgatgaaggcatcatcttcaacaaagtcgtagaagacttcgatttccgtgcggttgtttttagcctgaacgagctgaagggcattgaatacgaaggtcaatacattgataagcagtacgaagagttcgacccgagcagcgcaccactgttgcaagaccgtctgtggcaagcagtagaatctctgacacagtccaatgaaaccattgtggcggaacagggcacgtcgttcttcggtgcctccaccatcccactgaagagcaattcacgcttcatcggtcagccgctttggggcagcatcggctatacgtttccggcagcactgggatcacagattgcggataaggaaagtcgccatctgctgttcattggtgatggtagcctgcaactgaccgtgcaggagctgggcctggcgatccgtgagaaactgaacccgatttgtttcatcatcaacaacgatggctataccgtagagcgcgagattcatgggcctacacagccgtacaatgacatcccgatgtggaactatagcaaactgccggaaacctttggcgcgacggaagatcgcgtagttagcaagatcgttcgcacagagaacgagtttgtgagtgtcatgaaagaagcgcaggccgatgttaaccgcatgtattggattgaactggttctggagaaagaagatgcaccgaaactgctgaagaagatggggaagctgtttgcagaacagaacaaa

SEQ ID NO: 196 - protein, 547 aa, Artificial Sequence
  Variant of branched-chain keto acid decarboxylase (kdcA) from Lactococcus lactis
MYTVGDYLLDRLHELGIEEIFGVPGDYNLQFLDQIIAREDMKWIGNANELNASYMADGYARTKKAAAFLTTFGVGELSAINGLAGSYAENLPVVEIVGSPTSKVQNDGKFVHHTLADGDFKHFMKMHEPVTAARTLLTAENATTEIDRVLSQLLKERKPVYINLPVDVAAAKAEKPALSLEKESSTLNTTEQVILSKIEESLKNAQKPVVIAGHEVISFGLEKTVTQFVSETKLPITTLNFGKSAVDESLPSFLGIYNGKLSEISLKNFVESADFILMLGVKLTDISTGAFTHHLDENKMISLNIDEGIIFNKVVEDFDFRAVVFSLNELKGIEYEGQYIDKQYEEFDPSSAPLLQDRLWQAVESLTQSNETIVAEQGTSFFGASTIPLKSNSRFIGQPLWGSIGYTFPAALGSQIADKESRHLLFIGDGSLQLTVQELGLAIREKLNPICFIINNDGYTVEREIHGPTQPYNDIPMWNYSKLPETFGATEDRVVSKIVRTENEFVSVMKEAQADVNRMYWIELVLEKEDAPKLLKKMGKLFAEQNK

SEQ ID NO: 197 - DNA, 1641 bp, Artificial Sequence
  Variant of branched-chain keto acid decarboxylase (kdcA) from Lactococcus lactis
atgtacaccgttggcgactatctgctggaccgtctgcatgaactgggaattgaagaaatctttggcgtgccgggcgattacaatctgcaattcctggatcaaatcattgcgcgcgaagatatgagatggattggtaacgcgaatgaactgaatgcgagctacatggctgatggctatgcacgtacgaagaaggcggcggcgttcctgacgaccttcggtgttggtgaactgagcgcaatcaatgggttggcgggcagctatgcagagaacctgccagtcgtggaaatcgttgggagtccgacctcgaaggtgcagaacgatggcaagttcgttcatcacaccctggccgacggcgacttcaagcacttcatgaagatgcacgaaccggtcaccgctgcacgtacacatctgaccgccgagaacgcgaccacagagattgaccgcgtgctgagccaactgctgaaagaacgtaaacctgtgtacatcaacctgccggttgatgtcgccgcggcgaaagccgagaaaccagctctgagcctggagaaagaaagcagcacgttaaacaccacagaacaggtgatcctgtcgaagatcgaagaaagcctgaagtgggcccagaaaccggtcgtgatcgctgggcacgaggtgattagcttcggtctggagaagacggttacgcagtttgtgagtgaaaccaaactgccgattactaccctgaactttggcaaatcggctgtggatgaatccctgccgtccttcctgggtatctacaatggtaaactgagcgagattagcctcaagaactttgtggaaagcgcagacttcatcctgatgcttggtgtgaaactgacggatatcagtacgggcgcgtttacgcaccatctggacgagaacaagatgattagcctgaacattgatgaaggcatcatcttcaacaaagtcgtagaagacttcgatttccgtgcggttgttagcagcctgttggagctgacaggcattgaatacgaaggtcaatacattgataagcagtacgaagagttcattccgagcagcgcaccactgttgcaagaccgtctgtggcaagcagtagaatctctgacacagtccaatgaaaccattgtggcggaacagggcacgtcgttcttcggtgcctccaccatcttcctgaagagcaattcacgcttcatcggtcagccgctttggggcagcatcggctatacgtttccggcagcactgggatcacagattgcggataaggaaagtcgccatctgctgttcattggtgatggtagcctgcaactgaccgtgcaggagctgggcctggcgatccgtgagaaactgaacccgatttgtttcatcatcaacaacgatggctataccgtagagcgcgagattcatgggcctacacagccgtacaatgacatcccgatgtggaactatagcaaactgccggaaacctttggcgcgacggaagatcgcgtagttagcaagatcgttcgcacagagaacgagtttgtgagtgtcatgaaggaagcgcaggccgatgttaaccgcatgtattggattgaactggttctggagaaagaagatgcaccgaaactgctgaagaagatggggaagctgtttgcagaacagaacaaa

SEQ ID NO: 198 - protein, 547 aa, Artificial Sequence
  Variant of branched-chain keto acid decarboxylase (kdcA) from Lactococcus lactis
MYTVGDYLLDRLHELGIEEIFGVPGDYNLQFLDQIIAREDMRWIGNANELNASYMADGYARTKKAAAFLTTFGVGELSAINGLAGSYAENLPVVEIVGSPTSKVQNDGKFVHHTLADGDFKHFMKMHEPVTAARTHLTAENATTEIDRVLSQLLKERKPVYINLPVDVAAAKAEKPALSLEKESSTLNTTEQVILSKIEESLKWAQKPVVIAGHEVISFGLEKTVTQFVSETKLPITTLNFGKSAVDESLPSFLGIYNGKLSEISLKNFVESADFILMLGVKLTDISTGAFTHHLDENKMISLNIDEGIIFNKVVEDFDFRAVVSSLLELTGIEYEGQYIDKQYEEFIPSSAPLLQDRLWQAVESLTQSNETIVAEQGTSFFGASTIFLKSNSRFIGQPLWGSIGYTFPAALGSQIADKESRHLLFIGDGSLQLTVQELGLAIREKLNPICFIINNDGYTVEREIHGPTQPYNDIPMWNYSKLPETFGATEDRVVSKIVRTENEFVSVMKEAQADVNRMYWIELVLEKEDAPKLLKKMGKLFAEQNK

SEQ ID NO: 199 - DNA, 1641 bp, Artificial Sequence
  Variant of branched-chain keto acid decarboxylase (kdcA) from Lactococcus lactis
atgtacaccgttggcgactatctgctggaccgtctgcatgaactgggaattgaagaaatctttggcgtgccgggcgattacaatctgcaattcctggatcaaatcattgcgcgcgaagatatgagatggattggtaacgcgaatgaactgaatgcgagctacatggctgatggctatgcacgtacgaagaaggcggcggcgttcctgacgaccttcggtgttggtgaactgagcgcaatcaatgggttggcgggcagctatgcagagaacctgccagtcgtggaaatcgttgggagtccgacctcgaaggtgcagaacgatggcaagttcgttcatcacaccctggccgacggcgacttcaagcacttcatgaagatgcacgaaccggtcaccgctgcacgtacactgctgaccgccgagaacgcgaccacagagattgaccgcgtgctgagccaactgctgaaagaacgtaaacctgtgtacatcaacctgccggttgatgtcgccgcggcgaaagccgagaaaccagctctgagcctggagaaagaaagcagcacgttaaacaccacagaacaggtgatcctgtcgaagatcgaagaaagcctgaagaacgcccagaaaccggtcgtgatcgctgggcacgaggtgattagcttcggtctggagaagacggttacgcagtttgtgagtgaaaccaaactgccgattactaccctgaactttggcaaatcggctgtggatgaatccctgccgtccttcctgggtatctacaatggtaaactgagcgagattagcctcaagaactttgtggaaagcgcagacttcatcctgatgcttggtgtgaaactgacggatatcagtacgggcgcgtttacgcaccatctggacgagaacaagatgattagcctgaacattgatgaaggcatcatcttcaacaaagtcgtagaagacttcgatttccgtgcggttgttagcagcctgagcgagctgaaaggcattgaatacgaaggtcaatacattgataagcagtacgaagagttcattccgagcagcgcaccactgagccaagaccgtctgtggcaagcagtagaatctctgacacagtccaatgaaaccattgtggcggaacagggcacgtcgttcttcggtgcctccaccatcttcctgaagagcaattcacgcttcatcggtcagccgctttggggcagcatcggctatacgtttccggcagcactgggatcacagattgcggataaggaaagtcgccatctgctgttcattggtgatggtagcctgcaactgaccgtgcaggagctgggcctggcgatccgtgagaaactgaacccgatttgtttcatcatcaacaacgatggctataccgtagagcgcgagattcatgggcctacacagccgtacaatgacatcccgatgtggaactatagcaaactgccggaaacctttggcgcgacggaagatcgcgtagttagcaagatcgttcgcacagagaacgagtttgtgagtgtcatgaaagaagcgcaggccgatgttaaccgcatgtattggattgaactggttctggagaaagaagatgcaccgaaactgctgaagaagatggggaagctgtttgcagaacagaacaaa

SEQ ID NO: 200 - protein, 547 aa, Artificial Sequence
  Variant of branched-chain keto acid decarboxylase (kdcA) from Lactococcus lactis
MYTVGDYLLDRLHELGIEEIFGVPGDYNLQFLDQIIAREDMRWIGNANELNASYMADGYARTKKAAAFLTTFGVGELSAINGLAGSYAENLPVVEIVGSPTSKVQNDGKFVHHTLADGDFKHFMKMHEPVTAARTLLTAENATTEIDRVLSQLLKERKPVYINLPVDVAAAKAEKPALSLEKESSTLNTTEQVILSKIEESLKNAQKPVVIAGHEVISFGLEKTVTQFVSETKLPITTLNFGKSAVDESLPSFLGIYNGKLSEISLKNFVESADFILMLGVKLTDISTGAFTHHLDENKMISLNIDEGIIFNKVVEDFDFRAVVSSLSELKGIEYEGQYIDKQYEEFIPSSAPLSQDRLWQAVESLTQSNETIVAEQGTSFFGASTIFLKSNSRFIGQPLWGSIGYTFPAALGSQIADKESRHLLFIGDGSLQLTVQELGLAIREKLNPICFIINNDGYTVEREIHGPTQPYNDIPMWNYSKLPETFGATEDRVVSKIVRTENEFVSVMKEAQADVNRMYWIELVLEKEDAPKLLKKMGKLFAEQNK

SEQ ID NO: 201 - DNA, 1641 bp, Artificial Sequence
  Variant of branched-chain keto acid decarboxylase (kdcA) from Lactococcus lactis
atgtacaccgttggcgactatctgctggaccgtctgcatgaactgggaattgaagaaatctttggcgtgccgggcgattacaatctgcaattcctggatcaaatcattgcgcgcgaagatatgaaatggattggtaacgcgaatgaactgaatgcgagctacatggctgatggctatgcacgtacgaagaaggcggcggcgttcctgacgaccttcggtgttggtgaactgagcgcaatcaatgggttggcgggcagctatgcagagaacctgccagtcgtggaaatcgttgggagtccgacctcgaaggtgcagaaccgcggcaagttcgttcatcacaccctggccgacggcgacttcaagcacttcatgaagatgcacgaaccggtcaccgctgcacgtacactgctgaccgccgagaacgcgaccacagagattgaccgcgtgctgagccaactgctgaaagaacgtaaacctgtgtacatcaacctgccggttgatgtcgccgcggcgaaagccgagaaaccagctctgagcctggagaaagaaagcagcacgttaaacaccacagaacaggtgatcctgtcgaagatcgaagaaagcctgaagaacgcccagaaaccggtcgtgatcgctgggcacgaggtgattagcttcggtctggagaagacggttacgcagtttgtgagtgaaaccaaactgccgattactaccctgaactttggcaaatcggctgtggatgaatccctgccgtccttcctgggtatctacaatggtaaactgagcgagattagcctcaagaactttgtggaaagcgcagacttcatcctgatgcttggtgtgaaactgacggatatcagtacgggcgcgtttacgcaccatctggacgagaacaagatgattagcctgaacattgatgaaggcatcatcttcaacaaagtcgtagaagacttcgatttccgtgcggttgttagcagcctgagcgagctgaagggcattgaatacgaaggtcaatacattgataagcagtacgaagagttcgacccgagcagcgcaccactgttgcaagaccgtctgtggcaagcagtagaatctctgacacagtccaatgaaaccattgtggcggaacagggcacgtcgttcttcggtgcctccaccatcccactgaagagcaattcacgcttcatcggtcagccgctttggggcagcatcggctatacgtttccggcagcactgggatcacagattgcggataaggaaagtcgccatctgctgttcattggtgatggtagcctgcaactgaccgtgcaggagctgggcctggcgatccgtgagagactgaacccgatttgtttcatcatcaacaacgatggctataccgtagagcgcgagattcatgggcctacacagccgtacaatgacatcccgatgtggaactatagcaaactgccggaaacctttggcgcgacggaagatcgcgtagttagcaagatcgttcgcacagagaacgagtttgtgagtgtcatgaaagaagcgcaggccgatgttaaccgcatgtattggattgaactggttctggagaaagaagatgcaccgaaactgctgaagaagatggggaagctgtttgcagaacagaacaaa

SEQ ID NO: 202 - protein, 547 aa, Artificial Sequence
  Variant of branched-chain keto acid decarboxylase (kdcA) from Lactococcus lactis
MYTVGDYLLDRLHELGIEEIFGVPGDYNLQFLDQIIAREDMKWIGNANELNASYMADGYARTKKAAAFLTTFGVGELSAINGLAGSYAENLPVVEIVGSPTSKVQNRGKFVHHTLADGDFKHFMKMHEPVTAARTLLTAENATTEIDRVLSQLLKERKPVYINLPVDVAAAKAEKPALSLEKESSTLNTTEQVILSKIEESLKNAQKPVVIAGHEVISFGLEKTVTQFVSETKLPITTLNFGKSAVDESLPSFLGIYNGKLSEISLKNFVESADFILMLGVKLTDISTGAFTHHLDENKMISLNIDEGIIFNKVVEDFDFRAVVSSLSELKGIEYEGQYIDKQYEEFDPSSAPLLQDRLWQAVESLTQSNETIVAEQGTSFFGASTIPLKSNSRFIGQPLWGSIGYTFPAALGSQIADKESRHLLFIGDGSLQLTVQELGLAIRERLNPICFIINNDGYTVEREIHGPTQPYNDIPMWNYSKLPETFGATEDRVVSKIVRTENEFVSVMKEAQADVNRMYWIELVLEKEDAPKLLKKMGKLFAEQNK

SEQ ID NO: 203 - DNA, 1641 bp, Artificial Sequence
  Variant of branched-chain keto acid decarboxylase (kdcA) from Lactococcus lactis
atgtacaccgttggcgactatctgctggaccgtctgcatgaactgggaattgaagaaatctttggcgtgccgggcgattacaatctgcaattcctggatcaaatcattgcgcgcgaagatatgaaatggattggtaacgcgaatgaactgaatgcgagctacatggctgatggctatgcacgtacgaagaaggcggcggcgttcctgacgaccttcggtgttggtgaactgagcgcaatcaatgggttggcgggcagctatgcagagaacctgccagtcgtggaaatcgttgggagtccgacctcgaaggtgcagaacgacggcaagttcgttcatcacaccctggccgacggcgacttcaagcacttcatgaagatgcacgaaccggtcaccgctgcacgtacactgctgaccgccgagaacgcgaccacagagattgaccgcgtgctgagccaactgctgaaagaacgtaaacctgtgtacatcaacctgccggttgatgtcgccgcggcgaaagccgagaaaccagctctgagcctggagaaagaaagcccgacgttaaacaccacagaacaggtgatcctgtcgaagatcgaagaaagcctgaagaacgcccagaaaccggtcgtgatcgctgggcacgaggtgattagcttcggtctggagaagacggttacgcagtttgtgagtgaaaccaaactgccgattactaccctgaactttggcaaatcggctgtggatgaatccctgccgtccttcctgggtatctacaatggtaaactgagcgagattagcctcaagaactttgtggaaagcgcagacttcatcctgatgcttggtgtgaaactgacggatatcagtacgggcgcgtttacgcaccatctggacgagaacaagatgattagcctgaacattgatgaaggcatcatcttcaacaaagtcgtagaagacttcgatttccgtgcggttgttagcagcctgaacgagctgctaggcattgaatacgaaggtcaatacattgataagcagtacgaagagttcattccgagcagcgcaccactgagccaagaccgtctgtggcaagcagtagaatctctgacacagtccaatgaaaccattgtggcggaacagggcacgtcgttcttcggtgcctccaccatcttcctgaagagcaattcacgcttcatcggtcagccgctttggggcagcatcggctatacgtttccggcagcactgggatcacagattgcggataaggaaagtcgccatctgctgttcattggtgatggtagcctgcaactgaccgtgcaggagctgggcctggcgatccgtgagaaactgaacccgatttgtttcatcatcaacaacgatggctataccgtagagcgcgagattcatgggcctacacagccgtacaatgacatcccgatgtggaactatagcaaactgccggaaacctttggcgcgacggaagatcgcgtagttagcaagatcgttcgcacagagaacgagtttgtgagtgtcatgaaagaagcgcaggccgatgttaaccgcatgtattggattgaactggttctggagaaagaagatgcaccgaaactgctgaagaagatggggaagctgtttgcagaacagaacaaa

SEQ ID NO: 204 - protein, 547 aa, Artificial Sequence
  Variant of branched-chain keto acid decarboxylase (kdcA) from Lactococcus lactis
MYTVGDYLLDRLHELGIEEIFGVPGDYNLQFLDQIIAREDMKWIGNANELNASYMADGYARTKKAAAFLTTFGVGELSAINGLAGSYAENLPVVEIVGSPTSKVQNDGKFVHHTLADGDFKHFMKMHEPVTAARTLLTAENATTEIDRVLSQLLKERKPVYINLPVDVAAAKAEKPALSLEKESPTLNTTEQVILSKIEESLKNAQKPVVIAGHEVISFGLEKTVTQFVSETKLPITTLNFGKSAVDESLPSFLGIYNGKLSEISLKNFVESADFILMLGVKLTDISTGAFTHHLDENKMISLNIDEGIIFNKVVEDFDFRAVVSSLNELLGIEYEGQYIDKQYEEFIPSSAPLSQDRLWQAVESLTQSNETIVAEQGTSFFGASTIFLKSNSRFIGQPLWGSIGYTFPAALGSQIADKESRHLLFIGDGSLQLTVQELGLAIREKLNPICFIINNDGYTVEREIHGPTQPYNDIPMWNYSKLPETFGATEDRVVSKIVRTENEFVSVMKEAQADVNRMYWIELVLEKEDAPKLLKKMGKLFAEQNK

SEQ ID NO: 205 - DNA, 1641 bp, Artificial Sequence
  Variant of branched-chain keto acid decarboxylase (kdcA) from Lactococcus lactis
atgtacaccgttggcgactatctgctggaccgtctgcatgaactgggaattgaagaaatctttggcgtgccgggcgattacaatctgcaattcctggatcaaatcattgcgcgcgaagatatgaaatggattggtaacgcgaatgaactgaatgcgagctacatggctgatggctatgcacgtacgaagaaggcggcggcgttcctgacgaccttcggtgttggtgaactgagcgcaatcaatgggttggcgggcagctatgcagagaacctgccagtcgtggaaatcgttgggagtccgacctcgaaggtgcagaacgatggcaagttcgttcatcacaccctggccgacggcgacttcaagcacttcatgaagatgcacgaaccggtcaccgctgcacgtacactgctgaccgccgagaacgcgaccacagagattgaccgcgtgctgagccaactgctgaaagaacgtaaacctgtgtacatcaacctgccggttgatgtcgccgcggcgaaagccgagaaaccagctctgagcctggagaaagaaagcagcacgttaaacaccacagaacaggtgatcctgtcgaagatcgaagaaagcctgaagaacgcccagaaaccggtcgtgatcgctgggcacgaggtgattagcttcggtctggagaagacggttacgcagtttgtgagtgaaaccaaactgccgattactaccctgaactttggcaaatcggctgtggatgaatccctgccgtccttcctgggtatctacaatggtaaactgagcgagattagcctcaagaactttgtggaaagcgcagacttcatcctgatgcttggtgtgaaactgacggatatcagtacgggcgcgtttacgcaccatctggacgagaacaagatgattagcctgaacattgatgaaggcatcatcttcaacaaagtcgtagaagacttcgatttccgtgcggttgtttttagcctgagcgagctgcttggcattgaatacgaaggtcaatacattgataagcagtacgaagagttcattccgagcagcgcaccactgtcgcaagaccgtctgtggcaagcagtagaatctctgacacagtccaatgaaaccattgtggcggaacagggcacgtcgttcttcggtgcctccaccatcccactgaagagcaattcacgcttcatcggtcagccgctttggggcagcatcggctatacgtttccggcagcactgggatcacagattgcggataaggaaagtcgccatctgctgttcattggtgatggtagcctgcaactgaccgtgcaggagctgggcctggcgatccgtgagaaactgaacccgatttgtttcatcatcaacaacgatggctataccgtagagcgcgagattcatgggcctacacagccgtacaatgacatcccgatgtggaactatagcaaactgccggaaacctttggcgcgacggaagatcgcgtagttagcaagatcgttcgcacagagaacgagtttgtgagtgtcatgaaagaagcgcaggccgatgttaaccgcatgtattggattgaactggttctggagaaagaagatgcaccgaaactgctgaagaagatggggaagctgtttgcagaacagaacaaa

SEQ ID NO: 206 - protein, 547 aa, Artificial Sequence
  Variant of branched-chain keto acid decarboxylase (kdcA) from Lactococcus lactis
MYTVGDYLLDRLHELGIEEIFGVPGDYNLQFLDQIIAREDMKWIGNANELNASYMADGYARTKKAAAFLTTFGVGELSAINGLAGSYAENLPVVEIVGSPTSKVQNDGKFVHHTLADGDFKHFMKMHEPVTAARTLLTAENATTEIDRVLSQLLKERKPVYINLPVDVAAAKAEKPALSLEKESSTLNTTEQVILSKIEESLKNAQKPVVIAGHEVISFGLEKTVTQFVSETKLPITTLNFGKSAVDESLPSFLGIYNGKLSEISLKNFVESADFILMLGVKLTDISTGAFTHHLDENKMISLNIDEGIIFNKVVEDFDFRAVVFSLSELLGIEYEGQYIDKQYEEFIPSSAPLSQDRLWQAVESLTQSNETIVAEQGTSFFGASTIPLKSNSRFIGQPLWGSIGYTFPAALGSQIADKESRHLLFIGDGSLQLTVQELGLAIREKLNPICFIINNDGYTVEREIHGPTQPYNDIPMWNYSKLPETFGATEDRVVSKIVRTENEFVSVMKEAQADVNRMYWIELVLEKEDAPKLLKKMGKLFAEQNK

SEQ ID NO: 207 - DNA, 1641 bp, Artificial Sequence
  Variant of branched-chain keto acid decarboxylase (kdcA) from Lactococcus lactis
atgtacaccgttggcgactatctgctggaccgtctgcatgaactgggaattgaagaaatctttggcgtgccgggcgattacaatctgcaattcctggatcaaatcattgcgcgcgaagatatgaaatggattggtaacgcgaatgaactgaatgcgagctacatggctgatggctatgcacgtacgaagaaggcggcggcgttcctgacgaccttcggtgttggtgaactgagcgcaatcaatgggttggcgggcagctatgcagagaacctgccagtcgtggaaatcgttgggagtccgacctcgaaggtgcagaacgacggcaagttcgttcatcacaccctggccgacggcgacttcaagcacttcatgaagatgcacgaaccggtcaccgctgcacgtacactgctgaccgccgagaacgcgaccacagagattgaccgcgtgctgagccaactgctgaaagaacgtaaacctgtgtacatcaacctgccggttgatgtcgccgcggcgaaagccgagaaaccagctctgagcctggagaaagaaagcagcacgttaaacaccacagaacaggtgatcctgtcgaagatcgaagaaagcctgaagaacgcccagaaaccggtcgtgatcgctgggcacgaggtgattagcttcggtctggagaagacggttacgcagtttgtgagtgaaaccaaactgccgattactaccctgaactttggcaaatcggctgtggatgaatccctgccgtccttcctgggtatctacaatggtaaactgagcgagattagcctcaagaactttgtggaaagcgcagacttcatcctgatgcttggtgtgaaactgacggatatcagtacgggcgcgtttacgcaccatctggacgagaacaagatgattagcctgaacattgatgaaggcatcatcttcaacaaagtcgtagaagacttcgatttccgtgcggttgtttttagcctgagcgagctgcttggcattgaatacgaaggtcaatacattgataagcagtacgaagagttcattccgagcagcgcaccactgtcgcaagaccgtctgtggcaagcagtagaatctctgacacagtccaatgaaaccattgtggcggaacagggcacgtcgttcttcggtgcctccaccatcttcctgaagagcaattcacgcttcatcggtcagccgctttggggcagcatcggctatacgtttccggcagcactgggatcacagattgcggataaggaaagtcgccatctgctgttcattggtgatggtagcctgcaactgaccgtgcaggagctgggcctggcgatccgtgagagactgaacccgatttgtttcatcatcaacaacgatggctataccgtagagcgcgagattcatgggcctacacagccgtacaatgacatcccgatgtggaactatagcaaactgccggaaacctttggcgcgacggaagatcgcgtagttagcaagatcgttcgcacagagaacgagtttgtgagtgtcatgaaagaagcgcaggccgatgttaaccgcatgtattggattgaactggttctggagaaagaagatgcaccgaaactgctgaagaagatggggaagctgtttgcagaacagaacaaa

SEQ ID NO: 208 - protein, 547 aa, Artificial Sequence
  Variant of branched-chain keto acid decarboxylase (kdcA) from Lactococcus lactis
MYTVGDYLLDRLHELGIEEIFGVPGDYNLQFLDQIIAREDMKWIGNANELNASYMADGYARTKKAAAFLTTFGVGELSAINGLAGSYAENLPVVEIVGSPTSKVQNDGKFVHHTLADGDFKHFMKMHEPVTAARTLLTAENATTEIDRVLSQLLKERKPVYINLPVDVAAAKAEKPALSLEKESSTLNTTEQVILSKIEESLKNAQKPVVIAGHEVISFGLEKTVTQFVSETKLPITTLNFGKSAVDESLPSFLGIYNGKLSEISLKNFVESADFILMLGVKLTDISTGAFTHHLDENKMISLNIDEGIIFNKVVEDFDFRAVVFSLSELLGIEYEGQYIDKQYEEFIPSSAPLSQDRLWQAVESLTQSNETIVAEQGTSFFGASTIFLKSNSRFIGQPLWGSIGYTFPAALGSQIADKESRHLLFIGDGSLQLTVQELGLAIRERLNPICFIINNDGYTVEREIHGPTQPYNDIPMWNYSKLPETFGATEDRVVSKIVRTENEFVSVMKEAQADVNRMYWIELVLEKEDAPKLLKKMGKLFAEQNK

SEQ ID NO: 209 - DNA, 1641 bp, Artificial Sequence
  Variant of branched-chain keto acid decarboxylase (kdcA) from Lactococcus lactis
atgtacaccgttggcgactatctgctggaccgtctgcatgaactgggaattgaagaaatctttggcgtgccgggcgattacaatctgcaattcctggatcaaatcattgcgcgcgaagatatgaaatggattggtaacgcgaatgaactgaatgcgagctacatggctgatggctatgcacgtacgaagaaggcggcggcgttcctgacgaccttcggtgttggtgaactgagcgcaatcaatgggttggcgggcagctatgcagagaacctgccagtcgtggaaatcgttgggagtccgacctcgaaggtgcagaaccgcggcaagttcgttcatcacaccctggccgacggcgacttcaagcacttcatgaagatgcacgaaccggtcaccgctgcacgtacactgctgaccgccgagaacgcgaccacagagattgaccgcgtgctgagccaactgctgaaagaacgtaaacctgtgtacatcaacctgccggttgatgtcgccgcggcgaaagccgagaaaccagctctgagcctggagaaagaaagcagcacgttaaacaccacagaacaggtgatcctgtcgaagatcgaagaaagcctgaagaacgcccagaaaccggtcgtgatcgctgggcacgaggtgattagcttcggtctggagaagacggttacgcagtttgtgagtgaaaccaaactgccgattactaccctgaactttggcaaatcggctgtggatgaatccctgccgtccttcctgggtatctacaatggtaaactgagcgagattagcctcaagaactttgtggaaagcgcagacttcatcctgatgcttggtgtgaaactgacggatatcagtacgggcgcgtttacgcaccatctggacgagaacaagatgattagcctgaacattgatgaaggcatcatcttcaacaaagtcgtagaagacttcgatttccgtgcggttgtttttagcctgaacgagctgaagggcattgaatacgaaggtcaatacattgataagcagtacgaagagttcgacccgagcagcgcaccactgtcgcaagaccgtctgtggcaagcagtagaatctctgacacagtccaatgaaaccattgtggcggaacagggcacgtcgttcttcggtgcctccaccatcttcctgaagagcaattcacgcttcatcggtcagccgctttggggcagcatcggctatacgtttccggcagcactgggatcacagattgcggataaggaaagtcgccatctgctgttcattggtgatggtagcctgcaactgaccgtgcaggagctgggcctggcgatccgtgagagactgaacccgatttgtttcatcatcaacaacgatggctataccgtagagcgcgagattcatgggcctacacagccgtacaatgacatcccgatgtggaactatagcaaactgccggaaacctttggcgcgacggaagatcgcgtagttagcaagatcgttcgcacagagaacgagtttgtgagtgtcatgaaagaagcgcaggccgatgttaaccgcatgtattggattgaactggttctggagaaagaagatgcaccgaaactgctgaagaagatggggaagctgtttgcagaacagaacaaa

SEQ ID NO: 210 - protein, 547 aa, Artificial Sequence
  Variant of branched-chain keto acid decarboxylase (kdcA) from Lactococcus lactis
MYTVGDYLLDRLHELGIEEIFGVPGDYNLQFLDQIIAREDMKWIGNANELNASYMADGYARTKKAAAFLTTFGVGELSAINGLAGSYAENLPVVEIVGSPTSKVQNRGKFVHHTLADGDFKHFMKMHEPVTAARTLLTAENATTEIDRVLSQLLKERKPVYINLPVDVAAAKAEKPALSLEKESSTLNTTEQVILSKIEESLKNAQKPVVIAGHEVISFGLEKTVTQFVSETKLPITTLNFGKSAVDESLPSFLGIYNGKLSEISLKNFVESADFILMLGVKLTDISTGAFTHHLDENKMISLNIDEGIIFNKVVEDFDFRAVVFSLNELKGIEYEGQYIDKQYEEFDPSSAPLSQDRLWQAVESLTQSNETIVAEQGTSFFGASTIFLKSNSRFIGQPLWGSIGYTFPAALGSQIADKESRHLLFIGDGSLQLTVQELGLAIRERLNPICFIINNDGYTVEREIHGPTQPYNDIPMWNYSKLPETFGATEDRVVSKIVRTENEFVSVMKEAQADVNRMYWIELVLEKEDAPKLLKKMGKLFAEQNK

SEQ ID NO: 211 - DNA, 1641 bp, Artificial Sequence
  Variant of branched-chain keto acid decarboxylase (kdcA) from Lactococcus lactis
atgtacaccgttggcgactatctgctggaccgtctgcatgaactgggaattgaagaaatctttggcgtgccgggcgattacaatctgcaattcctggatcaaatcattgcgcgcgaagatatgaaatggattggtaacgcgaatgaactgaatgcgagctacatggctgatggctatgcacgtacgaagaaggcggcggcgttcctgacgaccttcggtgttggtgaactgagcgcaatcaatgggttggcgggcagctatgcagagaacctgccagtcgtggaaatcgttgggagtccgacctcgaaggtgcagaacgatggcaagttcgttcatcacaccctggccgacggcgacttcaagcacttcaggaagatgcacgaaccggtcaccgctgcacgtacacttctgaccgccgagaacgcgaccacagagattgaccgcgtgctgagccaactgctgaaagaacgtaaacctgtgtacatcaacctgccggttgatgtcgccgcggcgaaagccgagaaaccagctctgagcctggagaaagaaagcagcacgttaaacaccacagaacaggtgatcctgtcgaagatcgaagaaagcctgaagaacgcccagaaaccggtcgtgatcgctgggcacgaggtgattagcttcggtctggagaagacggttacgcagtttgtgagtgaaaccaaactgccgattactaccctgaactttggcaaatcggctgtggatgaatccctgccgtccttcctgggtatctacaatggtaaactgagcgagattagcctcaagaactttgtggaaagcgcagacttcatcctgatgcttggtgtgaaactgacggatatcagtacgggcgcgtttacgcaccatctggacgagaacaagatgattagcctgaacattgatgaaggcatcatcttcaacaaagtcgtagaagacttcgatttcagcgcggttgttagcagcctgtcggagctgacaggcattgaatacgaaggtcaatacattgatagacagtacgaagagttcattccgagcagcgcaccactgtcgcaagaccgtctgtggcaagcagtagaatctctgacacagtccaatgaaaccattgtggcggaacagggcacgtcgttcttcggtgcctccaccatcttcctgaagagcaattcacgcttcatcggtcagccgctttggggcagcatcggctatacgtttccggcagcactgggatcacagattgcggataaggaaagtcgccatctgctgttcattggtgatggtagcctgcaactgaccgtgcaggagctgggcctggcgatccgtgagaaactgaacccgatttgtttcatcatcaacaacgatggctataccgtagagcgcgagattcatgggcctacacagccgtacaatgacatcccgatgtggaactatagcaaactgccggaaacctttggcgcgacggaagatcgcgtagttagcaagatcgttcgcacagagaacgagtttgtgagtgtcatgttcgaagcgcaggccgatgttaaccgcatgtattggattgaactggttctggagaaagaagatgcaccgaaactgctgaagaagatggggaagctgtttgcagaacagaacaaa

SEQ ID NO: 212 - protein, 547 aa, Artificial Sequence
  Variant of branched-chain keto acid decarboxylase (kdcA) from Lactococcus lactis
MYTVGDYLLDRLHELGIEEIFGVPGDYNLQFLDQIIAREDMKWIGNANELNASYMADGYARTKKAAAFLTTFGVGELSAINGLAGSYAENLPVVEIVGSPTSKVQNDGKFVHHTLADGDFKHFRKMHEPVTAARTLLTAENATTEIDRVLSQLLKERKPVYINLPVDVAAAKAEKPALSLEKESSTLNTTEQVILSKIEESLKNAQKPVVIAGHEVISFGLEKTVTQFVSETKLPITTLNFGKSAVDESLPSFLGIYNGKLSEISLKNFVESADFILMLGVKLTDISTGAFTHHLDENKMISLNIDEGIIFNKVVEDFDFSAVVSSLSELTGIEYEGQYIDRQYEEFIPSSAPLSQDRLWQAVESLTQSNETIVAEQGTSFFGASTIFLKSNSRFIGQPLWGSIGYTFPAALGSQIADKESRHLLFIGDGSLQLTVQELGLAIREKLNPICFIINNDGYTVEREIHGPTQPYNDIPMWNYSKLPETFGATEDRVVSKIVRTENEFVSVMFEAQADVNRMYWIELVLEKEDAPKLLKKMGKLFAEQNK

SEQ ID NO: 213 - DNA, 1641 bp, Artificial Sequence
  Variant of branched-chain keto acid decarboxylase (kdcA) from Lactococcus lactis
atgtacaccgttggcgactatctgctggaccgtctgcatgaactgggaattgaagaaatctttggcgtgccgggcgattacaatctgcaattcctggatcaaatcattgcgcgcgaagatatgagatggattggtaacgcgaatgaactgaatgcgagctacatggctgatggctatgcacgtacgaagaaggcggcggcgttcctgacgaccttcggtgttggtgaactgagcgcaatcaatgggttggcgggcagctatgcagagaacctgccagtcgtggaaatcgttgggagtccgacctcgaaggtgcagaacgatggcaagttcgttcatcacaccctggccgacggcgacttcaagcacttcatgaagatgcacgaaccggtcaccgctgcacgtacactgctgaccgccgagaacgcgaccacagagattgaccgcgtgctgagccaactgctgaaagaacgtaaacctgtgtacatcaacctgccggttgatgtcgccgcggcgaaagccgagaaaccagctctgagcctggagaaagaaagcagcacgttaaacaccacagaacaggtgatcctgtcgaagatcgaagaaagcctgaagtgggcccagaaaccggtcgtgatcgctgggcacgaggtgattagcttcggtctggagaagacggttacgcagtttgtgagtgaaaccaaactgccgattactaccctgaactttggcaaatcggctgtggatgaatccctgccgtccttcctgggtatctacaatggtaaactgagcgagattagcctcaagaactttgtggaaagcgcagacttcatcctgatgcttggtgtgaaactgacggatatcagtacgggcgcgtttacgcaccatctggacgagaacaagatgattagcctgaacattgatgaaggcatcatcttcaacaaagtcgtagaagacttcgatttcagcgcggttgttagcagcctgttggagctgaaaggcattgaatacgaaggtcaatacattgatagacagtacgaagagttcattccgagcagcgcaccactgttgcaagaccgtctgtggcaagcagtagaatctctgacacagtccaatgaaaccattgtggcggaacagggcacgtcgttcttcggtgcctccaccatcttcctgaagagcaattcacgcttcatcggtcagccgctttggggcagcatcggctatacgtttccggcagcactgggatcacagattgcggataaggaaagtcgccatctgctgttcattggtgatggtagcctgcaactgaccgtgcaagagctgggcctggcgatccgtgagaaactgaacccgatttgtttcatcatcaacaacgatggctataccgtagagcgcgagattcatgggcctacacagccgtacaatgacatcccgatgtggaactatagcaaactgccggaaacctttggcgcgacggaagatcgcgtagttagcaagatcgttcgcacagagaacgagtttgtgagtgtcatgttcgaagcgcaggccgatgttaaccgcatgtattggattgaactggttctggagaaagaagatgcaccgaaactgctgaagaagatggggaagctgtttgcagaacagaacaaa

SEQ ID NO: 214 - protein, 547 aa, Artificial Sequence
  Variant of branched-chain keto acid decarboxylase (kdcA) from Lactococcus lactis
MYTVGDYLLDRLHELGIEEIFGVPGDYNLQFLDQIIAREDMRWIGNANELNASYMADGYARTKKAAAFLTTFGVGELSAINGLAGSYAENLPVVEIVGSPTSKVQNDGKFVHHTLADGDFKHFMKMHEPVTAARTLLTAENATTEIDRVLSQLLKERKPVYINLPVDVAAAKAEKPALSLEKESSTLNTTEQVILSKIEESLKWAQKPVVIAGHEVISFGLEKTVTQFVSETKLPITTLNFGKSAVDESLPSFLGIYNGKLSEISLKNFVESADFILMLGVKLTDISTGAFTHHLDENKMISLNIDEGIIFNKVVEDFDFSAVVSSLLELKGIEYEGQYIDRQYEEFIPSSAPLLQDRLWQAVESLTQSNETIVAEQGTSFFGASTIFLKSNSRFIGQPLWGSIGYTFPAALGSQIADKESRHLLFIGDGSLQLTVQELGLAIREKLNPICFIINNDGYTVEREIHGPTQPYNDIPMWNYSKLPETFGATEDRVVSKIVRTENEFVSVMFEAQADVNRMYWIELVLEKEDAPKLLKKMGKLFAEQNK

SEQ ID NO: 215 - DNA, 1641 bp, Artificial Sequence
  Variant of branched-chain keto acid decarboxylase (kdcA) from Lactococcus lactis
atgtacaccgttggcgactatctgctggaccgtctgcatgaactgggaattgaagaaatctttggcgtgccgggcgattacaatctgcaattcctggatcaaatcattgcgcgcgaagatatgaaatggattggtaacgcgaatgaactgaatgcgagctacatggctgatggctatgcacgtacgaagaaggcggcggcgttcctgacgaccttcggtgttggtgaactgagcgcaatcaatgggttggcgggcagctatgcagagaacctgccagtcgtggaaatcgttgggagtccgacctcgaaggtgcagaaccgaggcaagttcgttcatcacaccctggccgacggcgacttcaagcacttcatgaagatgcacgaaccggtcaccgctgcacgtacactgctgaccgccgagaacgcgaccacagagattgaccgcgtgctgagccaactgctgaaagaacgtaaacctgtgtacatcaacctgccggttgatgtcgccgcggcgaaagccgagaaaccagctctgagcctggagaaatacagctcgacgttaaacaccacagaacaggtgatcctgtcgaagatcgaagaaagcctgaagaacgcccagaaaccggtcgtgatcgctgggcacgaggtgattagcttcggtctggagaagacggttacgcagtttgtgagtgaaaccaggctgccgattactaccctgaactttggcaaatcggctgtggatgaatccctgccgtccttcctgggtatctacaatggttcactgagcgagattagcctcaagaactttgtggaaagcgcagacttcatcctgatgcttggtgtgaaactgacggatatcagtacgggcgcgtttacgcaccatctggacgagaacaagatgattagcctgaacattgatgaaggcatcatcttcaacaaagtcgtagaagacttcgatttccgtgcggttgttagcagcctgagcgagctgctaggcattgaatacgaaggtcaatacattgataagcagtacgaagagttcgacccgagcgtcgcaccactgagccaagaccgtctgtggcaagcagtagaatctctgacacagtccaatgaaaccattgtggcggaacagggcacgtcgttcttcggtgcctccaccatcttcctgaagagcaattcacgcttcatcggtcagccgctttggggcagcatcggctatacgtttccggcagcactgggatcacagattgcggatgacgaaagtcgccatctgctgttcattggtgatggtagcctgcaactgaccgtgcaggagctgggcctggcgatccgtgagaaactgaacccgatttgtttcatcatcaacaacgatggctataccgtagagcgcgagattcatgggcctacacagccgtacaatgacatcccgatgtggaactatagcaaactgccggaaacctttggcgcgacggaagatcgcgtagttagcaagatcgttcgcacagagaacgagtttgtgagtgtcatgaaagaagcgcaggccgatgttaaccgcatgtattggattgaactggttctggagaaagaagatgcaccgaaactgctgaagaagatggggaagctgtttgcagaacagaacaaa

SEQ ID NO: 216 - protein, 547 aa, Artificial Sequence
  Variant of branched-chain keto acid decarboxylase (kdcA) from Lactococcus lactis
MYTVGDYLLDRLHELGIEEIFGVPGDYNLQFLDQIIAREDMKWIGNANELNASYMADGYARTKKAAAFLTTFGVGELSAINGLAGSYAENLPVVEIVGSPTSKVQNRGKFVHHTLADGDFKHFMKMHEPVTAARTLLTAENATTEIDRVLSQLLKERKPVYINLPVDVAAAKAEKPALSLEKYSSTLNTTEQVILSKIEESLKNAQKPVVIAGHEVISFGLEKTVTQFVSETRLPITTLNFGKSAVDESLPSFLGIYNGSLSEISLKNFVESADFILMLGVKLTDISTGAFTHHLDENKMISLNIDEGIIFNKVVEDFDFRAVVSSLSELLGIEYEGQYIDKQYEEFDPSVAPLSQDRLWQAVESLTQSNETIVAEQGTSFFGASTIFLKSNSRFIGQPLWGSIGYTFPAALGSQIADDESRHLLFIGDGSLQLTVQELGLAIREKLNPICFIINNDGYTVEREIHGPTQPYNDIPMWNYSKLPETFGATEDRVVSKIVRTENEFVSVMKEAQADVNRMYWIELVLEKEDAPKLLKKMGKLFAEQNK

SEQ ID NO: 217 - DNA, 1641 bp, Artificial Sequence
  Variant of branched-chain keto acid decarboxylase (kdcA) from Lactococcus lactis
atgtacaccgttggcgactatctgctggaccgtctgcatgaactgggaattgaagaaatctttggcgtgccgggcgattacaatctgcaattcctggatcaaatcattgcgcgcgaagatatgaaatggattggtaacgcgaatgaactgaatgcgagctacatggctgatggctatgcacgtacgaagaaggcggcggcgttcctgacgaccttcggtgttggtgaactgagcgcaatcaatgggttggcgggcagctatgcagagaacctgccagtcgtggaaatcgttgggagtccgacctcgaaggtgcagaacgatggcaagttcgttcatcacaccctggccgacggcgacttcaagcacttcatgaagatgcacgaaccggtcaccgctgcacgtacacttctgaccgccgagaacgcgaccacagagattgaccgcgtgctgagccaactgctgaaagaacgtaaacctgtgtacatcaacctgccggttgatgtcgccgcggcgaaagccgagaaaccagctctgagcctggagaaagaaagcagcacgttaaacaccacagaacaggtgatcctgtcgaagatcgaagaaagcctgaagaacgcccagaaaccggtcgtgatcgctgggcacgaggtgattagcttcggtctggagaagacggttacgcagtttgtgagtgaaaccaaactgccgattactaccctgaactttggcaaatcggctgtggatgaatccctgccgtccttcctgggtatctacaatggtaaactgagcgagattagcctcaagaactttgtggaaagcgcagacttcatcctgatgcttggtgtgaaactgacggatatcagtacgggcgcgtttacgcaccatctggacgagaacaagatgattagcctgaacattgatgaaggcatcatcttcaacaaagtcgtagaagacttcgatttccgcgcggttgttagcagcctgagcgagctgaaaggcattgaatacgaaggtcaatacattgatagacagtacgaagagttcattccgagcagcgcaccactgatgcaagaccgtctgtggcaagcagtagaatctctgacacagtccaatgaaaccattgtggcggaacagggcacgtcgttcttcggtgcctccaccatcttcctgaagagcaattcacgcttcatcggtcagccgctttggggcagcatcggctatacgtttccggcagcactgggatcacagattgcggataaggaaagtcgccatctgctgttcattggtgatggtagcctgcaactgaccgtgcaagagctgggcctggcgatccgtgagaaactgaacccgatttgtttcatcatcaacaacgatggctataccgtagagcgcgagattcatgggcctacacagccgtacaatgacatcccgatgtggaactatagcaaactgccggaaacctttggcgcgacggaagatcgcgtagttagcaagatcgttcgcacagagaacgagtttgtgagtgtcatgaaagaagcgcaggccgatgttaaccgcatgtattggattgaactggttctggagaaagaagatgcaccgaaactgctgaagaagatggggaagctgtttgcagaacagaacaaa

SEQ ID NO: 218 - protein, 547 aa, Artificial Sequence
  Variant of branched-chain keto acid decarboxylase (kdcA) from Lactococcus lactis
MYTVGDYLLDRLHELGIEEIFGVPGDYNLQFLDQIIAREDMKWIGNANELNASYMADGYARTKKAAAFLTTFGVGELSAINGLAGSYAENLPVVEIVGSPTSKVQNDGKFVHHTLADGDFKHFMKMHEPVTAARTLLTAENATTEIDRVLSQLLKERKPVYINLPVDVAAAKAEKPALSLEKESSTLNTTEQVILSKIEESLKNAQKPVVIAGHEVISFGLEKTVTQFVSETKLPITTLNFGKSAVDESLPSFLGIYNGKLSEISLKNFVESADFILMLGVKLTDISTGAFTHHLDENKMISLNIDEGIIFNKVVEDFDFRAVVSSLSELKGIEYEGQYIDRQYEEFIPSSAPLMQDRLWQAVESLTQSNETIVAEQGTSFFGASTIFLKSNSRFIGQPLWGSIGYTFPAALGSQIADKESRHLLFIGDGSLQLTVQELGLAIREKLNPICFIINNDGYTVEREIHGPTQPYNDIPMWNYSKLPETFGATEDRVVSKIVRTENEFVSVMKEAQADVNRMYWIELVLEKEDAPKLLKKMGKLFAEQNK

SEQ ID NO: 219 - DNA, 1641 bp, Artificial Sequence
  Variant of branched-chain keto acid decarboxylase (kdcA) from Lactococcus lactis
atgtacaccgttggcgactatctgctggaccgtctgcatgaactgggaattgaagaaatctttggcgtgccgggcgattacaatctgcaattcctggatcaaatcattgcgcgcgaagatatgaaatggattggtaacgcgaatgaactgaatgcgagctacatggctgatggctatgcacgtacgaagaaggcggcggcgttcctgacgaccttcggtgttggtgaactgagcgcaatcaatgggttggcgggcagctatgcagagaacctgccagtcgtggaaatcgttgggagtccgacctcgaaggtgcagaaccgcggcaagttcgttcatcacaccctggccgacggcgacttcaagcacttctggaagatgcacgaaccggtcaccgctgcacgtacactgctgaccgccgagaacgcgaccacagagattgaccgcgtgctgagccaactgctgaaagaacgtaaacctgtgtacatcaacctgccggttgatgtcgccgcggcgaaagccgagaaaccagctctgagcctggagaaagaaagcagcacgttaaacaccacagaacaggtgatcctgtcgaagatcgaagaaagcctgaagaacgcccagaaaccggtcgtgatcgctgggcacgaggtgattagcttcggtctggagaagacggttacgcagtttgtgagtgaaacccacctgccgattactaccctgaactttggcaaatcggctgtggatgaatccctgccgtccttcctgggtatctacaatggtaaactgagcgagattagcctcaagaactttgtggaaagcgcagacttcatcctgatgcttggtgtgaaactgacggatatcagtacgggcgcgtttacgcaccatctggacgagaacaagatgattagcctgaacattgatgaaggcatcatcttcaacaaagtcgtagaagacttcgatttccgtgcggttgttagcagcctgagcgagctgaaaggcattgaatacgaaggtcaatacattgataagcagtacgaagagttcattccgagcagcgcaccactgttgcaagaccgtctgtggcaagcagtagaatctctgacacagtccaatgaaaccattgtggcggaacagggcacgtcgttcttcggtgcctccaccatcttcctgaagagcaattcacgcttcatcggtcagccgctttggggcagcatcggctatacgtttccggcagcactgggatcacagattgcggataaggaaagtcgccatctgctgttcattggtgatggtagcctgcaactgaccgtgcaggagctgggcctggcgatccgtgagagactgaacccgatttgtttcatcatcaacaacgatggctataccgtagagcgcgagattcatgggcctacacagccgtacaatgacatcccgatgtggaactatagcaaactgccggaaacctttggcgcgacggaagatcgcgtagttagcaagatcgttcgcacagagaacgagtttgtgagtgtcatgaaagaagcgcaggccgatgttaaccgcatgtattggattgaactggttctggagaaagaagatgcaccgaaactgctgaagaagatggggaagctgtttgcagaacagaacaaa

SEQ ID NO: 220 - protein, 547 aa, Artificial Sequence
  Variant of branched-chain keto acid decarboxylase (kdcA) from Lactococcus lactis
MYTVGDYLLDRLHELGIEEIFGVPGDYNLQFLDQIIAREDMKWIGNANELNASYMADGYARTKKAAAFLTTFGVGELSAINGLAGSYAENLPVVEIVGSPTSKVQNRGKFVHHTLADGDFKHFWKMHEPVTAARTLLTAENATTEIDRVLSQLLKERKPVYINLPVDVAAAKAEKPALSLEKESSTLNTTEQVILSKIEESLKNAQKPVVIAGHEVISFGLEKTVTQFVSETHLPITTLNFGKSAVDESLPSFLGIYNGKLSEISLKNFVESADFILMLGVKLTDISTGAFTHHLDENKMISLNIDEGIIFNKVVEDFDFRAVVSSLSELKGIEYEGQYIDKQYEEFIPSSAPLLQDRLWQAVESLTQSNETIVAEQGTSFFGASTIFLKSNSRFIGQPLWGSIGYTFPAALGSQIADKESRHLLFIGDGSLQLTVQELGLAIRERLNPICFIINNDGYTVEREIHGPTQPYNDIPMWNYSKLPETFGATEDRVVSKIVRTENEFVSVMKEAQADVNRMYWIELVLEKEDAPKLLKKMGKLFAEQNK

SEQ ID NO: 221 - DNA, 1641 bp, Artificial Sequence
  Variant of branched-chain keto acid decarboxylase (kdcA) from Lactococcus lactis
atgtacaccgttggcgactatctgctggaccgtctgcatgaactgggaattgaagaaatctttggcgtgccgggcgattacaatctgcaattcctggatcaaatcattgcgcgcgaagatatgaaatggattggtaacgcgaatgaactgaatgcgagctacatggctgatggctatgcacgtacgaagaaggcggcggcgttcctgacgaccttcggtgttggtgaactgagcgcaatcaatgggttggcgggcagctatgcagagaacctgccagtcgtggaaatcgttgggagtccgacctcgaaggtgcagaacgatggcaagttcgttcatcacaccctggccgacggcgacttcaagcacttcaggaagatgcacgaaccggtcaccgctgcacgtacacttctgaccgccgagaacgcgaccacagagattgaccgcgtgctgagccaactgctgaaagaacgtaaacctgtgtacatcaacctgccggttgatgtcgccgcggcgaaagccgagaaaccagctctgagcctggagaaagaaagcagcacgttaaacaccacagaacaggtgatcctgtcgaagatcgaagaaagcctgaagaacgcccagaaaccggtcgtgatcgctgggcacgaggtgattagcttcggtctggagaagacggttacgcagtttgtgagtgaaaccaaactgccgattactaccctgaactttggcaaatcggctgtggatgaatccctgccgtccttcctgggtatctacaatggtaaactgagcgagattagcctcaagaactttgtggaaagcgcagacttcatcctgatgcttggtgtgaaactgacggatatcagtacgggcgcgtttacgcaccatctggacgagaacaagatgattagcctgaacattgatgaaggcatcatcttcaacaaagtcgtagaagacttcgatttcagcgcggttgttagcagcctgttggagctgaaaggcattgaatacgaaggtcaatacattgataagcagtacgaagagttcattccgagcagcgcaccactgagccaagaccgtctgtggcaagcagtagaatctctgacacagtccaatgaaaccattgtggcggaacagggcacgtcgttcttcggtgcctccaccatcttcctgaagagcaattcacgcttcatcggtcagccgctttggggcagcatcggctatacgtttccggcagcactgggatcacagattgcggataaggaaagtcgccatctgctgttcattggtgatggtagcctgcaactgaccgtgcaagagctgggcctggcgatccgtgagaaactgaacccgatttgtttcatcatcaacaacgatggctataccgtagagcgcgagattcatgggcctacacagccgtacaatgacatcccgatgtggaactatagcaaactgccggaaacctttggcgcgacggaagatcgcgtagttagcaagatcgttcgcacagagaacgagtttgtgagtgtcatgttcgaagcgcaggccgatgttaaccgcatgtattggattgaactggttctggagaaagaagatgcaccgaaactgctgaagaagatggggaagctgtttgcagaacagaacaaa

SEQ ID NO: 222 - protein, 547 aa, Artificial Sequence
  Variant of branched-chain keto acid decarboxylase (kdcA) from Lactococcus lactis
MYTVGDYLLDRLHELGIEEIFGVPGDYNLQFLDQIIAREDMKWIGNANELNASYMADGYARTKKAAAFLTTFGVGELSAINGLAGSYAENLPVVEIVGSPTSKVQNDGKFVHHTLADGDFKHFRKMHEPVTAARTLLTAENATTEIDRVLSQLLKERKPVYINLPVDVAAAKAEKPALSLEKESSTLNTTEQVILSKIEESLKNAQKPVVIAGHEVISFGLEKTVTQFVSETKLPITTLNFGKSAVDESLPSFLGIYNGKLSEISLKNFVESADFILMLGVKLTDISTGAFTHHLDENKMISLNIDEGIIFNKVVEDFDFSAVVSSLLELKGIEYEGQYIDKQYEEFIPSSAPLSQDRLWQAVESLTQSNETIVAEQGTSFFGASTIFLKSNSRFIGQPLWGSIGYTFPAALGSQIADKESRHLLFIGDGSLQLTVQELGLAIREKLNPICFIINNDGYTVEREIHGPTQPYNDIPMWNYSKLPETFGATEDRVVSKIVRTENEFVSVMFEAQADVNRMYWIELVLEKEDAPKLLKKMGKLFAEQNK

SEQ ID NO: 223 - DNA, 1641 bp, Artificial Sequence
  Variant of branched-chain keto acid decarboxylase (kdcA) from Lactococcus lactis
atgtacaccgttggcgactatctgctggaccgtctgcatgaactgggaattgaagaaatctttggcgtgccgggcgattacaatctgcaattcctggatcaaatcattgcgcgcgaagatatgaaatggattggtaacgcgaatgaactgaatgcgagctacatggctgatggctatgcacgtacgaagaaggcggcggcgttcctgacgaccttcggtgttggtgaactgagcgcaatcaatgggttggcgggcagctatgcagagaacctgccagtcgtggaaatcgttgggagtccgacctcgaaggtgcagaaccgaggcaagttcgttcatcacaccctggccgacggcgacttcaagcacttcatgaagatgcacgaaccggtcaccgctgcacgtacactgctgaccgccgagaacgcgaccacagagattgaccgcgtgctgagccaactgctgaaagaacgtaaacctgtgtacatcaacctgccggttgatgtcgccgcggcgaaagccgagaaaccagctctgagcctggagaaatacagcccgacgttaaacaccacagaacaggtgatcctgtcgaagatcgaagaaagcctgaagaacgcccagaaaccggtcgtgatcgctgggcacgaggtgattagcttcggtctggagaagacggttacgcagtttgtgagtgaaaccaggctgccgattactaccctgaactttggcaaatcggctgtggatgaatccctgccgtccttcctgggtatctacaatggtaagctgagcgagattagcctcaagaactttgtggaaagcgcagacttcatcctgatgcttggtgtgaaactgacggatatcagtacgggcgcgtttacgcaccatctggacgagaacaagatgattagcctgaacattgatgaaggcatcatcttcaacaaagtcgtagaagacttcgatttccgtgcggttgttagcagcctgaacgagctgctaggcattgaatacgaaggtcaatacattgataagcagtacgaagagttcattccgagcgtcgcaccactgagccaagaccgtctgtggcaagcagtagaatctctgacacagtccaatgaaaccattgtggcggaacagggcacgtcgttcttcggtgcctccaccatccctctgaagagcaattcacgcttcatcggtcagccgctttggggcagcatcggctatacgtttccggcagcactgggatcacagattgcggatgacgaaagtcgccatctgctgttcattggtgatggtagcctgcaactgaccgtgcaggagctgggcctggcgatccgtgagaaactgaacccgatttgtttcatcatcaacaacgatggctataccgtagagcgcgagattcatgggcctacacagccgtacaatgacatcccgatgtggaactatagcaaactgccggaaacctttggcgcgacggaagatcgcgtagttagcaagatcgttcgcacagagaacgagtttgtgagtgtcatgaaagaagcgcaggccgatgttaaccgcatgtattggattgaactggttctggagaaatgggatgcaccgaaactgctgaagaagatggggaagctgtttgcagaacagaacaaa

SEQ ID NO: 224 - protein, 547 aa, Artificial Sequence
  Variant of branched-chain keto acid decarboxylase (kdcA) from Lactococcus lactis
MYTVGDYLLDRLHELGIEEIFGVPGDYNLQFLDQIIAREDMKWIGNANELNASYMADGYARTKKAAAFLTTFGVGELSAINGLAGSYAENLPVVEIVGSPTSKVQNRGKFVHHTLADGDFKHFMKMHEPVTAARTLLTAENATTEIDRVLSQLLKERKPVYINLPVDVAAAKAEKPALSLEKYSPTLNTTEQVILSKIEESLKNAQKPVVIAGHEVISFGLEKTVTQFVSETRLPITTLNFGKSAVDESLPSFLGIYNGKLSEISLKNFVESADFILMLGVKLTDISTGAFTHHLDENKMISLNIDEGIIFNKVVEDFDFRAVVSSLNELLGIEYEGQYIDKQYEEFIPSVAPLSQDRLWQAVESLTQSNETIVAEQGTSFFGASTIPLKSNSRFIGQPLWGSIGYTFPAALGSQIADDESRHLLFIGDGSLQLTVQELGLAIREKLNPICFIINNDGYTVEREIHGPTQPYNDIPMWNYSKLPETFGATEDRVVSKIVRTENEFVSVMKEAQADVNRMYWIELVLEKWDAPKLLKKMGKLFAEQNK

SEQ ID NO: 225 - DNA, 1641 bp, Artificial Sequence
  Variant of branched-chain keto acid decarboxylase (kdcA) from Lactococcus lactis
atgtacaccgttggcgactatctgctggaccgtctgcatgaactgggaattgaagaaatctttggcgtgccgggcgattacaatctgcaattcctggatcaaatcattgcgcgcgaagatatgaaatggattggtaacgcgaatgaactgaatgcgagctacatggctgatggctatgcacgtacgaagaaggcggcggcgttcctgacgaccttcggtgttggtgaactgagcgcaatcaatgggttggcgggcagctatgcagagaacctgccagtcgtggaaatcgttgggagtccgacctcgaaggtgcagaaccgaggcaagttcgttcatcacaccctggccgacggcgacttcaagcacttcatgaagatgcacgaaccggtcaccgctgcacgtacactgctgaccgccgagaacgcgaccacagagattgaccgcgtgctgagccaactgctgaaagaacgtaaacctgtgtacatcaacctgccggttgatgtcgccgcggcgaaagccgagaaaccagctctgagcctggagaaatacagcccgacgttaaacaccacagaacaggtgatcctgtcgaagatcgaagaaagcctgaagaacgcccagaaaccggtcgtgatcgctgggcacgaggtgattagcttcggtctggagaagacggttacgcagtttgtgagtgaaaccaggctgccgattactaccctgaactttggcaaatcggctgtggatgaatccctgccgtccttcctgggtatctacaatggtaagctgagcgagattagcctcaagaactttgtggaaagcgcagacttcatcctgatgcttggtgtgaaactgacggatatcagtacgggcgcgtttacgcaccatctggacgagaacaagatgattagcctgaacattgatgaaggcatcatcttcaacaaagtcgtagaagacttcgatttccgtgcggttgttagcagcctgaacgagctgctaggcattgaatacgaaggtcaatacattgataagcagtacgaagagttcattccgagcgtcgcaccactgagccaagaccgtctgtggcaagcagtagaatctctgacacagtccaatgaaaccattgtggcggaacagggcacgtcgttcttcggtgcctccaccatccctctgaagagcaattcacgcttcatcggtcagccgctttggggcagcatcggctatacgtttccggcagcactgggatcacagattgcggatgacgaaagtcgccatctgctgttcattggtgatggtagcctgcaactgaccgtgcaggagctgggcctggcgatccgtgagaaactgaacccgatttgtttcatcatcaacaacgatggctataccgtagagcgcgagattcatgggcctacacagccgtacaatgacatcccgatgtggaactatagcaaactgccggaaacctttggcgcgacggaagatcgcgtagttagcaagatcgttcgcacagagaacgagtttgtgagtgtcatgaaagaagcgcaggccgatgttaaccgcatgtattggattgaactggttctggagaaaagggatgcaccgaaactgctgaagaagatggggaagctgtttgcagaacagaacaaa

SEQ ID NO: 226 - protein, 547 aa, Artificial Sequence
  Variant of branched-chain keto acid decarboxylase (kdcA) from Lactococcus lactis
MYTVGDYLLDRLHELGIEEIFGVPGDYNLQFLDQIIAREDMKWIGNANELNASYMADGYARTKKAAAFLTTFGVGELSAINGLAGSYAENLPVVEIVGSPTSKVQNRGKFVHHTLADGDFKHFMKMHEPVTAARTLLTAENATTEIDRVLSQLLKERKPVYINLPVDVAAAKAEKPALSLEKYSPTLNTTEQVILSKIEESLKNAQKPVVIAGHEVISFGLEKTVTQFVSETRLPITTLNFGKSAVDESLPSFLGIYNGKLSEISLKNFVESADFILMLGVKLTDISTGAFTHHLDENKMISLNIDEGIIFNKVVEDFDFRAVVSSLNELLGIEYEGQYIDKQYEEFIPSVAPLSQDRLWQAVESLTQSNETIVAEQGTSFFGASTIPLKSNSRFIGQPLWGSIGYTFPAALGSQIADDESRHLLFIGDGSLQLTVQELGLAIREKLNPICFIINNDGYTVEREIHGPTQPYNDIPMWNYSKLPETFGATEDRVVSKIVRTENEFVSVMKEAQADVNRMYWIELVLEKRDAPKLLKKMGKLFAEQNK

SEQ ID NO: 227 - DNA, 1641 bp, Artificial Sequence
  Variant of branched-chain keto acid decarboxylase (kdcA) from Lactococcus lactis
atgtacaccgttggcgactatctgctggaccgtctgcatgaactgggaattgaagaaatctttggcgtgccgggcgattacaatctgcaattcctggatcaaatcattgcgcgcgaagatatgaaatggattggtaacgcgaatgaactgaatgcgagctacatggctgatggctatgcacgtacgaagaaggcggcggcgttcctgacgaccttcggtgttggtgaactgagcgcaatcaatgggttggcgggcagctatgcagagaacctgccagtcgtggaaatcgttgggagtccgacctcgaaggtgcagaaccgaggcaagttcgttcatcacaccctggccgacggcgacttcaagcacttcatgaagatgcacgaaccggtcaccgctgcacgtacactgctgaccgccgagaacgcgaccacagagattgaccgcgtgctgagccaactgctgaaagaacgtaaacctgtgtacatcaacctgccggttgatgtcgccgcggcgaaagccgagaaaccagctctgagcctggagaaatacagcccgacgttaaacaccacagaacaggtgatcctgtcgaagatcgaagaaagcctgaagaacgcccagaaaccggtcgtgatcgctgggcacgaggtgattagcttcggtctggagaagacggttacgcagtttgtgagtgaaaccaggctgccgattactaccctgaactttggcaaatcggctgtggatgaatccctgccgtccttcctgggtatctacaatggtaagctgagcgagattagcctcaagaactttgtggaaagcgcagacttcatcctgatgcttggtgtgaaactgacggatatcagtacgggcgcgtttacgcaccatctggacgagaacaagatgattagcctgaacattgatgaaggcatcatcttcaacaaagtcgtagaagacttcgatttccgtgcggttgttagcagcctgaacgagctgctaggcattgaatacgaaggtcaatacattgataagcagtacgaagagttcattccgagcgtcgcaccactgagccaagaccgtctgtggcaagcagtagaatctctgacacagtccaatgaaaccattgtggcggaacagggcacgtcgttcttcggtgcctccaccatccctctgaagagcaattcacgcttcatcggtcagccgctttggggcagcatcggctatacgtttccggcagcactgggatcacagattgcggatgacgaaagtcgccatctgctgttcattggtgatggtagcctgcaactgaccgtgcaggagctgggcctggcgatccgtgagaaactgaacccgatttgtttcatcatcaacaacgatggctataccgtagagcgcgagattcatgggcctacacagccgtacaatgacatcccgatgtggaactatagcaaactgccggaaacctttggcgcgacggaagatcgcgtagttagcaagatcgttcgcacagagaacgagtttgtggcggtcatgaaagaagcgcaggccgatgttaaccgcatgtattggattgaactggttctggagaaagaagatgcaccgaaactgctgaagaagatggggaagctgtttgcagaacagaacaaa

SEQ ID NO: 228 - protein, 547 aa, Artificial Sequence
  Variant of branched-chain keto acid decarboxylase (kdcA) from Lactococcus lactis
MYTVGDYLLDRLHELGIEEIFGVPGDYNLQFLDQIIAREDMKWIGNANELNASYMADGYARTKKAAAFLTTFGVGELSAINGLAGSYAENLPVVEIVGSPTSKVQNRGKFVHHTLADGDFKHFMKMHEPVTAARTLLTAENATTEIDRVLSQLLKERKPVYINLPVDVAAAKAEKPALSLEKYSPTLNTTEQVILSKIEESLKNAQKPVVIAGHEVISFGLEKTVTQFVSETRLPITTLNFGKSAVDESLPSFLGIYNGKLSEISLKNFVESADFILMLGVKLTDISTGAFTHHLDENKMISLNIDEGIIFNKVVEDFDFRAVVSSLNELLGIEYEGQYIDKQYEEFIPSVAPLSQDRLWQAVESLTQSNETIVAEQGTSFFGASTIPLKSNSRFIGQPLWGSIGYTFPAALGSQIADDESRHLLFIGDGSLQLTVQELGLAIREKLNPICFIINNDGYTVEREIHGPTQPYNDIPMWNYSKLPETFGATEDRVVSKIVRTENEFVAVMKEAQADVNRMYWIELVLEKEDAPKLLKKMGKLFAEQNK

SEQ ID NO: 229 - DNA, 1641 bp, Artificial Sequence
  Variant of branched-chain keto acid decarboxylase (kdcA) from Lactococcus lactis
atgtacaccgttggcgactatctgctggaccgtctgcatgaactgggaattgaagaaatctttggcgtgccgggcgattacaatctgcaattcctggatcaaatcattgcgcgcgaagatatgaaatggattggtaacgcgaatgaactgaatgcgagctacatggctgatggctatgcacgtacgaagaaggcggcggcgttcctgacgaccttcggtgttggtgaactgagcgcaatcaatgggttggcgggcagctatgcagagaacctgccagtcgtggaaatcgttgggagtccgacctcgaaggtgcagaaccgaggcaagttcgttcatcacaccctggccgacggcgacttcaagcacttcatgaagatgcacgaaccggtcaccgctgcacgtacactgctgaccgccgagaacgcgaccacagagattgaccgcgtgctgagccaactgctgaaagaacgtaaacctgtgtacatcaacctgccggttgatgtcgccgcggcgaaagccgagaaaccagctctgagcctggagaaatacagcccgacgttaaacaccacagaacaggtgatcctgtcgaagatcgaagaaagcctgaagaacgcccagaaaccggtcgtgatcgctgggcacgaggtgattagcttcggtctggagaagacggttacgcagtttgtgagtgaaaccaggctgccgattactaccctgaactttggcaaatcggctgtggatgaatccctgccgtccttcctgggtatctacaatggtaagctgagcgagattagcctcaagaactttgtggaaagcgcagacttcatcctgatgcttggtgtgaaactgacggatatcagtacgggcgcgtttacgcaccatctggacgagaacaagatgattagcctgaacattgatgaaggcatcatcttcaacaaagtcgtagaagacttcgatttccgtgcggttgttagcagcctgaacgagctgctaggcattttgtacgaaggtcaatacattgataagcagtacgaagagttcattccgagcgtcgcaccactgagccaagaccgtctgtggcaagcagtagaatctctgacacagtccaatgaaaccattgtggcggaacagggcacgtcgttcttcggtgcctccaccatccctctgaagagcaattcacgcttcatcggtcagccgctttggggcagcatcggctatacgtttccggcagcactgggatcacagattgcggatgacgaaagtcgccatctgctgttcattggtgatggtagcctgcaactgaccgtgcaggagctgggcctggcgatccgtgagaaactgaacccgatttgtttcatcatcaacaacgatggctataccgtagagcgcgagattcatgggcctacacagccgtacaatgacatcccgatgtggaactatagcaaactgccggaaacctttggcgcgacggaagatcgcgtagttagcaagatcgttcgcacagagaacgagtttgtgagtgtcatgaaagaagcgcaggccgatgttaaccgcatgtattggattgaactggttctggagaaagaagatgcaccgaaactgctgaagaagatggggaagctgtttgcagaacagaacaaa

SEQ ID NO: 230 - protein, 547 aa, Artificial Sequence
  Variant of branched-chain keto acid decarboxylase (kdcA) from Lactococcus lactis
MYTVGDYLLDRLHELGIEEIFGVPGDYNLQFLDQIIAREDMKWIGNANELNASYMADGYARTKKAAAFLTTFGVGELSAINGLAGSYAENLPVVEIVGSPTSKVQNRGKFVHHTLADGDFKHFMKMHEPVTAARTLLTAENATTEIDRVLSQLLKERKPVYINLPVDVAAAKAEKPALSLEKYSPTLNTTEQVILSKIEESLKNAQKPVVIAGHEVISFGLEKTVTQFVSETRLPITTLNFGKSAVDESLPSFLGIYNGKLSEISLKNFVESADFILMLGVKLTDISTGAFTHHLDENKMISLNIDEGIIFNKVVEDFDFRAVVSSLNELLGILYEGQYIDKQYEEFIPSVAPLSQDRLWQAVESLTQSNETIVAEQGTSFFGASTIPLKSNSRFIGQPLWGSIGYTFPAALGSQIADDESRHLLFIGDGSLQLTVQELGLAIREKLNPICFIINNDGYTVEREIHGPTQPYNDIPMWNYSKLPETFGATEDRVVSKIVRTENEFVSVMKEAQADVNRMYWIELVLEKEDAPKLLKKMGKLFAEQNK

SEQ ID NO: 231 - DNA, 1641 bp, Artificial Sequence
  Variant of branched-chain keto acid decarboxylase (kdcA) from Lactococcus lactis
atgtacaccgttggcgactatctgctggaccgtctgcatgaactgggaattgaagaaatctttggcgtgccgggcgattacaatctgcaattcctggatcaaatcattgcgcgcgaagatatgaaatggattggtaacgcgaatgaactgaatgcgagctacatggctgatggctatgcacgtacgaagaaggcggcggcgttcctgacgaccttcggtgttggtgaactgagcgcaatcaatgggttggcgggcagctatgcagagaacctgccagtcgtggaaatcgttgggagtccgacctcgaaggtgcagaaccgaggcaagttcgttcatcacaccctggccgacggcgacttcaagcacttcatgaagatgcacgaaccggtcaccgctgcacgtacactgctgaccgccgagaacgcgaccacagagattgaccgcgtgctgagccaactgctgaaagaacgtaaacctgtgtacatcaacctgccggttgatgtcgccgcggcgaaagccgagaaaccagctctgagcctggagaaatacagcccgacgttaaacaccacagaacaggtgatcctgtcgaagatcgaagaaagcctgaagaacgcccagaaaccggtcgtgatcgctgggcacgaggtgattagcttcggtctggagaagacggttacgcagtttgtgagtgaaaccaggctgccgattactaccctgaactttggcaaatcggctgtggatgaatccctgccgtccttcctgggtatctacaatggtaagctgagcgagattagcctcaagaactttgtggaaagcgcagacttcatcctgatgcttggtgtgaaactgacggatatcagtacgggcgcgtttacgcaccatctggacgagaacaagatgattagcctgaacattgatgaaggcatcatcttcaacaaagtcgtagaagacttcgatttccgtgcggttgttagcagcctgaacgagctgctaggcattgaatacgaaggtcaatacattgataagcagtacgaagagttcattccgagcgtcgcaccactgagccaagaccgtctgtggcaagcagtagaatctctgacacagtccaatgaaaccattgtggcggaacagggcacgtcgttcttcggtgcctccaccatccctctgaagagcaattcacgcttcatcggtcagccgctttggggcagcatcggctatacgtttccggcagcactgggatcacagattgcggatgacgaaagtcgccatctgctgttcattggtgatggtagcctgcaactgaccgtgcaggagctgggcctggcgatccgtgagaaactgaacccgatttgtttcatcatcaacaacgatggctataccgtagagcgcgagattcatgggcctacacagccgtacaatgacatcccgatgtggaactatagcaaactgccggaaacctttggcgcgacggaagatcgcgtagttagcaagatcgttcgcacagagaacgagtttgtgagtgtcatgaaagaagcgcaggccgatgttaaccgcatgtattggattgaactggttctggggaaagaagatgcaccgaaactgctgaagaagatggggaagctgtttgcagaacagaacaaa

SEQ ID NO: 232 - protein, 547 aa, Artificial Sequence
  Variant of branched-chain keto acid decarboxylase (kdcA) from Lactococcus lactis
MYTVGDYLLDRLHELGIEEIFGVPGDYNLQFLDQIIAREDMKWIGNANELNASYMADGYARTKKAAAFLTTFGVGELSAINGLAGSYAENLPVVEIVGSPTSKVQNRGKFVHHTLADGDFKHFMKMHEPVTAARTLLTAENATTEIDRVLSQLLKERKPVYINLPVDVAAAKAEKPALSLEKYSPTLNTTEQVILSKIEESLKNAQKPVVIAGHEVISFGLEKTVTQFVSETRLPITTLNFGKSAVDESLPSFLGIYNGKLSEISLKNFVESADFILMLGVKLTDISTGAFTHHLDENKMISLNIDEGIIFNKVVEDFDFRAVVSSLNELLGIEYEGQYIDKQYEEFIPSVAPLSQDRLWQAVESLTQSNETIVAEQGTSFFGASTIPLKSNSRFIGQPLWGSIGYTFPAALGSQIADDESRHLLFIGDGSLQLTVQELGLAIREKLNPICFIINNDGYTVEREIHGPTQPYNDIPMWNYSKLPETFGATEDRVVSKIVRTENEFVSVMKEAQADVNRMYWIELVLGKEDAPKLLKKMGKLFAEQNK

SEQ ID NO: 233 - DNA, 1641 bp, Artificial Sequence
  Variant of branched-chain keto acid decarboxylase (kdcA) from Lactococcus lactis
atgtacaccgttggcgactatctgctggaccgtctgcatgaactgggaattgaagaaatctttggcgtgccgggcgattacaatctgcaattcctggatcaaatcattgcgcgcgaagatatgaaatggattggtaacgcgaatgaactgaatgcgagctacatggctgatggctatgcacgtacgaagaaggcggcggcgttcctgacgaccttcggtgttggtgaactgagcgcaatcaatgggttggcgggcagctatgcagagaacctgccagtcgtggaaatcgttgggagtccgacctcgaaggtgcagaaccgaggcaagttcgttcatcacaccctggccgacggcgacttcaagcacttcatgaagatgcacgaaccggtcaccgctgcacgtacactgctgaccgccgagaacgcgaccacagagattgaccgcgtgctgagccaactgctgaaagaacgtaaacctgtgtacatcaacctgccggttgatgtcgccgcggcgaaagccgagaaaccagctctgagcctggagaaatacagcccgacgttaaacaccacagaacaggtgatcctgtcgaagatcgaagaaagcctgaagaacgcccagaaaccggtcgtgatcgctgggcacgaggtgattagcttcggtctggagaagacggttacgcagtttgtgagtgaaaccaggctgccgattactaccctgaactttggcaaatcggctgtggatgaatccctgccgtccttcctgggtatctacaatggtaagctgagcgagattagcctcaagaactttgtggaaagcgcagacttcatcctgatgcttggtgtgaaactgacggatatcagtacgggcgcgtttacgcaccatctggacgagaacaagatgattagcctgaacattgatgaaggcatcatcttcaacaaagtcgtagaagacttcgatttccgtgcggttgttagcagcctgaacgagctgctaggcattgaatacgaaggtcaatacattgataagcagtacgaagagttcattccgagcgtcgcaccactgagccaagaccgtctgtggcaagcagtagaatctctgacacagtccaatgaaaccattgtggcggaacagggcacgtcgttcttcggtgcctccaccatccctctgaagagcaattcacgcttcatcggtcagccgctttggggcagcatcggctatacgtttccggcagcactgggatcacagattgcggatgacgaaagtcgccatctgctgttcattggtgatggtagcctgcaactgaccgtgcaggagctgggcctggcgatccgtgagaaactgaacccgatttgtttcatcatcaacaacgatggctataccgtagagcgcgagattcatgggcctacacagccgtacaatgacatcccgatgtggaactatagcaaactgccggaaacctttggcgcgacggaagatcgcgtagttagcaagatcgttcgcacagagaacgagtttgtgagtgtcatgaaagaagcgcaggccgatgttaaccgcatgtattggattgaactggttctggagaaatgtgatgcaccgaaactgctgaagaagatggggaagctgtttgcagaacagaacaaa

SEQ ID NO: 234 - protein, 547 aa, Artificial Sequence
  Variant of branched-chain keto acid decarboxylase (kdcA) from Lactococcus lactis
MYTVGDYLLDRLHELGIEEIFGVPGDYNLQFLDQIIAREDMKWIGNANELNASYMADGYARTKKAAAFLTTFGVGELSAINGLAGSYAENLPVVEIVGSPTSKVQNRGKFVHHTLADGDFKHFMKMHEPVTAARTLLTAENATTEIDRVLSQLLKERKPVYINLPVDVAAAKAEKPALSLEKYSPTLNTTEQVILSKIEESLKNAQKPVVIAGHEVISFGLEKTVTQFVSETRLPITTLNFGKSAVDESLPSFLGIYNGKLSEISLKNFVESADFILMLGVKLTDISTGAFTHHLDENKMISLNIDEGIIFNKVVEDFDFRAVVSSLNELLGIEYEGQYIDKQYEEFIPSVAPLSQDRLWQAVESLTQSNETIVAEQGTSFFGASTIPLKSNSRFIGQPLWGSIGYTFPAALGSQIADDESRHLLFIGDGSLQLTVQELGLAIREKLNPICFIINNDGYTVEREIHGPTQPYNDIPMWNYSKLPETFGATEDRVVSKIVRTENEFVSVMKEAQADVNRMYWIELVLEKCDAPKLLKKMGKLFAEQNK

SEQ ID NO: 235 - DNA, 1641 bp, Artificial Sequence
  Variant of branched-chain keto acid decarboxylase (kdcA) from Lactococcus lactis
atgtacaccgttggcgactatctgctggaccgtctgcatgaactgggaattgaagaaatctttggcgtgccgggcgattacaatctgcaattcctggatcaaatcattgcgcgcgaagatatgaaatggattggtaacgcgaatgaactgaatgcgagctacatggctgatggctatgcacgtacgaagaaggcggcggcgttcctgacgaccttcggtgttggtgaactgagcgcaatcaatgggttggcgggcagctatgcagagaacctgccagtcgtggaaatcgttgggagtccgacctcgaaggtgcagaaccgaggcaagttcgttcatcacaccctggccgacggcgacttcaagcacttcatgaagatgcacgaaccggtcaccgctgcacgtacactgctgaccgccgagaacgcgaccacagagattgaccgcgtgctgagccaactgctgaaagaacgtaaacctgtgtacatcaacctgccggttgatgtcgccgcggcgaaagccgagaaaccagctctgagcctggagaaatacagcccgacgttaaacaccacagaacaggtgatcctgtcgaagatcgaagaaagcctgaagaacgcccagaaaccggtcgtgatcgctgggcacgaggtgattagcttcggtctggagaagacggttacgcagtttgtgagtgaaaccaggctgccgattactaccctgaactttggcaaatcggctgtggatgaatccctgccgtccttcctgggtatctacaatggtaagctgagcgagattagcctcaagaactttgtggaaagcgcagacttcatcctgatgcttggtgtgaaactgacggatatcagtacgggcgcgtttacgcaccatctggacgagaacaagatgattagcctgaacattgatgaaggcatcatcttcaacaaagtcgtagaagacttcgatttccgtgcggttgttagcagcctgaacgagctgctaggcattgaatacgaaggtcaatacattgataagcagtacgaagagttcattccgagcgtcgcaccactgagccaagaccgtctgtggcaagcagtagaatctctgacagagtccaatgaaaccattgtggcggaacagggcacgtcgttcttcggtgcctccaccatccctctgaagagcaattcacgcttcatcggtcagccgctttggggcagcatcggctatacgtttccggcagcactgggatcacagattgcggatgacgaaagtcgccatctgctgttcattggtgatggtagcctgcaactgaccgtgcaggagctgggcctggcgatccgtgagaaactgaacccgatttgtttcatcatcaacaacgatggctataccgtagagcgcgagattcatgggcctacacagccgtacaatgacatcccgatgtggaactatagcaaactgccggaaacctttggcgcgacggaagatcgcgtagttagcaagatcgttcgcacagagaacgagtttgtgagtgtcatgaaagaagcgcaggccgatgttaaccgcatgtattggattgaactggttctggagaaagaagatgcaccgaaactgctgaagaagatggggaagctgtttgcagaacagaacaaa

SEQ ID NO: 236 - protein, 547 aa, Artificial Sequence
  Variant of branched-chain keto acid decarboxylase (kdcA) from Lactococcus lactis
MYTVGDYLLDRLHELGIEEIFGVPGDYNLQFLDQIIAREDMKWIGNANELNASYMADGYARTKKAAAFLTTFGVGELSAINGLAGSYAENLPVVEIVGSPTSKVQNRGKFVHHTLADGDFKHFMKMHEPVTAARTLLTAENATTEIDRVLSQLLKERKPVYINLPVDVAAAKAEKPALSLEKYSPTLNTTEQVILSKIEESLKNAQKPVVIAGHEVISFGLEKTVTQFVSETRLPITTLNFGKSAVDESLPSFLGIYNGKLSEISLKNFVESADFILMLGVKLTDISTGAFTHHLDENKMISLNIDEGIIFNKVVEDFDFRAVVSSLNELLGIEYEGQYIDKQYEEFIPSVAPLSQDRLWQAVESLTESNETIVAEQGTSFFGASTIPLKSNSRFIGQPLWGSIGYTFPAALGSQIADDESRHLLFIGDGSLQLTVQELGLAIREKLNPICFIINNDGYTVEREIHGPTQPYNDIPMWNYSKLPETFGATEDRVVSKIVRTENEFVSVMKEAQADVNRMYWIELVLEKEDAPKLLKKMGKLFAEQNK

SEQ ID NO: 237 - DNA, 1641 bp, Artificial Sequence
  Variant of branched-chain keto acid decarboxylase (kdcA) from Lactococcus lactis
atgtacaccgttggcgactatctgctggaccgtctgcatgaactgggaattgaagaaatctttggcgtgccgggcgattacaatctgcaattcctggatcaaatcattgcgcgcgaagatatgaaatggattggtaacgcgaatgaactgaatgcgagctacatggctgatggctatgcacgtacgaagaaggcggcggcgttcctgacgaccttcggtgttggtgaactgagcgcaatcaatgggttggcgggcagctatgcagagaacctgccagtcgtggaaatcgttgggagtccgacctcgaaggtgcagaaccgaggcaagttcgttcatcacaccctggccgacggcgacttcaagcacttcatgaagatgcacgaaccggtcaccgctgcacgtacactgctgaccgccgagaacgcgaccacagagattgaccgcgtgctgagccaactgctgaaagaacgtaaacctgtgtacatcaacctgccggttgatgtcgccgcggcgaaagccgagaaaccagctctgagcctggagaaatacagcccgacgttaaacaccacagaacaggtgatcctgtcgaagatcgaagaaagcctgaagaacgcccagaaaccggtcgtgatcgctgggcacgaggtgattagcttcggtctggagaagacggttacgcagtttgtgagtgaaaccaggctgccgattactaccctgaactttggcaaatcggctgtggatgaatccctgccgtccttcctgggtatctacaatggtaagctgagcgagattagcctcaagaactttgtggaaagcgcagacttcatcctgatgcttggtgtgaaactgacggatatcagtacgggcgcgtttacgcaccatctggacgagaacaagatgattagcctgaacattgatgaaggcatcatcttcaacaaaacggtagaagacttcgatttccgtgcggttgttagcagcctgaacgagctgctaggcattgaatacgaaggtcaatacattgataagcagtacgaagagttcattccgagcgtcgcaccactgagccaagaccgtctgtggcaagcagtagaatctctgacacagtccaatgaaaccattgtggcggaacagggcacgtcgttcttcggtgcctccaccatccctctgaagagcaattcacgcttcatcggtcagccgctttggggcagcatcggctatacgtttccggcagcactgggatcacagattgcggatgacgaaagtcgccatctgctgttcattggtgatggtagcctgcaactgaccgtgcaggagctgggcctggcgatccgtgagaaactgaacccgatttgtttcatcatcaacaacgatggctataccgtagagcgcgagattcatgggcctacacagccgtacaatgacatcccgatgtggaactatagcaaactgccggaaacctttggcgcgacggaagatcgcgtagttagcaagatcgttcgcacagagaacgagtttgtgagtgtcatgaaagaagcgcaggccgatgttaaccgcatgtattggattgaactggttctggagaaagaagatgcaccgaaactgctgaagaagatggggaagctgtttgcagaacagaacaaa

SEQ ID NO: 238 - protein, 547 aa, Artificial Sequence
  Variant of branched-chain keto acid decarboxylase (kdcA) from Lactococcus lactis
MYTVGDYLLDRLHELGIEEIFGVPGDYNLQFLDQIIAREDMKWIGNANELNASYMADGYARTKKAAAFLTTFGVGELSAINGLAGSYAENLPVVEIVGSPTSKVQNRGKFVHHTLADGDFKHFMKMHEPVTAARTLLTAENATTEIDRVLSQLLKERKPVYINLPVDVAAAKAEKPALSLEKYSPTLNTTEQVILSKIEESLKNAQKPVVIAGHEVISFGLEKTVTQFVSETRLPITTLNFGKSAVDESLPSFLGIYNGKLSEISLKNFVESADFILMLGVKLTDISTGAFTHHLDENKMISLNIDEGIIFNKTVEDFDFRAVVSSLNELLGIEYEGQYIDKQYEEFIPSVAPLSQDRLWQAVESLTQSNETIVAEQGTSFFGASTIPLKSNSRFIGQPLWGSIGYTFPAALGSQIADDESRHLLFIGDGSLQLTVQELGLAIREKLNPICFIINNDGYTVEREIHGPTQPYNDIPMWNYSKLPETFGATEDRVVSKIVRTENEFVSVMKEAQADVNRMYWIELVLEKEDAPKLLKKMGKLFAEQNK

SEQ ID NO: 239 - DNA, 1641 bp, Artificial Sequence
  Variant of branched-chain keto acid decarboxylase (kdcA) from Lactococcus lactis
atgtacaccgttggcgactatctgctggaccgtctgcatgaactgggaattgaagaaatctttggcgtgccgggcgattacaatctgcaattcctggatcaaatcattgcgcgcgaagatatgaaatggattggtaacgcgaatgaactgaatgcgagctacatggctgatggctatgcacgtacgaagaaggcggcggcgttcctgacgaccttcggtgttggtgaactgagcgcaatcaatgggttggcgggcagctatgcagagaacctgccagtcgtggaaatcgttgggagtccgacctcgaaggtgcagaaccgaggcaagttcgttcatcacaccctggccgacggcgacttcaagcacttcatgaagatgcacgaaccggtcaccgctgcacgtacactgctgaccgccgagaacgcgaccacagagattgaccgcgtgctgagccaactgctgaaagaacgtaaacctgtgtacatcaacctgccggttgatgtcgccgcggcgaaagccgagaaaccagctctgagcctggagaaatacagcccgacgttaaacaccacagaacaggtgatcctgtcgaagatcgaagaaagcctgaagaacgcccagaaaccggtcgtgatcgctgggcacgaggtgattagcttcggtctggagaagacggttacgcagtttgtgagtgaaaccaggctgccgattactaccctgaactttggcaaatcggctgtggatgaatccctgccgtccttcctgggtatctacaatggtaagctgagcgagattagcctcaagaactttgtggaaagcgcagacttcatcctgatgcttggtgtgaaactgacggatatcagtacgggcgcgtttacgcaccatctggacgagaacaagatgattagcctgaacattgatgaaggcatcatcttcaacaaagtcgtagaagacttcgatttccgtgcggttgttagcagcctgaacgagctgctaggcattgaatacgaaggtcaatacattgataagcagtacgaagagttcattccgagcgtcgcaccactgagccaagaccgtctgtggcaagcagtagaatctctgacacagtccaatgaaaccattgtggcggaacagggcacgtcgttcttcggtgcctccaccatccctctgaagagcaattcacgcttcatcggtcagccgctttggggcagcatcggctatacgtttccggcagcactgggatcacagattgcggatgacgaaagtcgccatctgctgttcattggtgatggtagcctgcaactgaccgtgcaggagctgggcctggcgatccgtgagaaactgaacccgatttgtttcatcatcaacaacgatggctataccgtagagcgcgagattcatgggcctacacagccgtacaatgacatcccgatgtggaactatagcaaactgccggaaacctttggcgcgacggaagatcgcgtagttagcaagatcgttcgcacagagaacgagtttgtgagtgtcatgaaagaagcgcaggccgatgttaaccgcatgtattggattgaactggttctgaggaaagaagatgcaccgaaactgctgaagaagatggggaagctgtttgcagaacagaacaaa

SEQ ID NO: 240 - protein, 547 aa, Artificial Sequence
  Variant of branched-chain keto acid decarboxylase (kdcA) from Lactococcus lactis
MYTVGDYLLDRLHELGIEEIFGVPGDYNLQFLDQIIAREDMKWIGNANELNASYMADGYARTKKAAAFLTTFGVGELSAINGLAGSYAENLPVVEIVGSPTSKVQNRGKFVHHTLADGDFKHFMKMHEPVTAARTLLTAENATTEIDRVLSQLLKERKPVYINLPVDVAAAKAEKPALSLEKYSPTLNTTEQVILSKIEESLKNAQKPVVIAGHEVISFGLEKTVTQFVSETRLPITTLNFGKSAVDESLPSFLGIYNGKLSEISLKNFVESADFILMLGVKLTDISTGAFTHHLDENKMISLNIDEGIIFNKVVEDFDFRAVVSSLNELLGIEYEGQYIDKQYEEFIPSVAPLSQDRLWQAVESLTQSNETIVAEQGTSFFGASTIPLKSNSRFIGQPLWGSIGYTFPAALGSQIADDESRHLLFIGDGSLQLTVQELGLAIREKLNPICFIINNDGYTVEREIHGPTQPYNDIPMWNYSKLPETFGATEDRVVSKIVRTENEFVSVMKEAQADVNRMYWIELVLRKEDAPKLLKKMGKLFAEQNK

SEQ ID NO: 241 - DNA, 1641 bp, Artificial Sequence; identical to SEQ ID NO: 227
  Variant of branched-chain keto acid decarboxylase (kdcA) from Lactococcus lactis

SEQ ID NO: 242 - protein, 547 aa, Artificial Sequence; identical to SEQ ID NO: 228
  Variant of branched-chain keto acid decarboxylase (kdcA) from Lactococcus lactis

SEQ ID NO: 243 - DNA, 1641 bp, Artificial Sequence
  Variant of branched-chain keto acid decarboxylase (kdcA) from Lactococcus lactis
atgtacaccgttggcgactatctgctggaccgtctgcatgaactgggaattgaagaaatctttggcgtgccgggcgattacaatctgcaattcctggatcaaatcattgcgcgcgaagatatgaaatggattggtaacgcgaatgaactgaatgcgagctacatggctgatggctatgcacgtacgaagaaggcggcggcgttcctgacgaccttcggtgttggtgaactgagcgcaatcaatgggttggcgggcagctatgcagagaacctgccagtcgtggaaatcgttgggagtccgacctcgaaggtgcagaaccgaggcaagttcgttcatcacaccctggccgacggcgacttcaagcacttcatgaagatgcacgaaccggtcaccgctgcacgtacactgctgaccgccgagaacgcgaccacagagattgaccgcgtgctgagccaactgctgaaagaacgtaaacctgtgtacatcaacctgccggttgatgtcgccgcggcgaaagccgagaaaccagctctgagcctggagaaatacagcccgacgttaaacaccacagaacaggtgatcctgtcgaagatcgaagaaagcctgaagaacgcccagaaaccggtcgtgatcgctgggcacgaggtgattagcttcggtctggagaagacggttacgcagtttgtgagtgaaaccaggctgccgattactaccctgaactttggcaaatcggctgtggatgaatccctgccgtccttcctgggtatctacaatggtaagctgagcgagattagcctcaagaactttgtggaaagcgcagacttcatcctgatgcttggtgtgaaactgacggatatcagtacgggcgcgtttacgcaccatctggacgagaacaagatgattagcctgaacattgatgaaggcatcatcttcaacaaagtcgtagaagacttcgatttccgtgcggttgttagcagcctgaacgagctgctaggcattgaatacgaaggtcaatacattgataagcagtacgaagagttcattccgagcgtcgcaccactgagccaagaccgtctgtggcaagcagtagaatctctgacacagtccaatgaaaccattgtggcggaacagggcacgtcgttcttcggtgcctccaccatccctctgaagagcaattcacgcttcatcggtcagccgctttggggcagcatcggctatacgtttccggcagcactgggatcacagattgcggatgacgaaagtcgccatctgctgttcattggtgatggtagcctgcaactgaccgtgcaggagctgggcctggcgatccgtgagaaactgaacccgatttgtttcatcatcaacaacgatggctataccgtagagcgcgagattcatgggcctacacagccgtacaatgacatcccgatgtggaactatagcaaactgccggaaacctttggcgcgacggaagatcgcgtagttagcaagatcgttcgcacagagaacgagtttgtgagtgtcatgaaagaagcgcaggccgatgttaaccgcatgtattggattgaactggttctggagaaaaatgatgcaccgaaactgctgaagaagatggggaagctgtttgcagaacagaacaaa

SEQ ID NO: 244 - protein, 547 aa, Artificial Sequence
  Variant of branched-chain keto acid decarboxylase (kdcA) from Lactococcus lactis
MYTVGDYLLDRLHELGIEEIFGVPGDYNLQFLDQIIAREDMKWIGNANELNASYMADGYARTKKAAAFLTTFGVGELSAINGLAGSYAENLPVVEIVGSPTSKVQNRGKFVHHTLADGDFKHFMKMHEPVTAARTLLTAENATTEIDRVLSQLLKERKPVYINLPVDVAAAKAEKPALSLEKYSPTLNTTEQVILSKIEESLKNAQKPVVIAGHEVISFGLEKTVTQFVSETRLPITTLNFGKSAVDESLPSFLGIYNGKLSEISLKNFVESADFILMLGVKLTDISTGAFTHHLDENKMISLNIDEGIIFNKVVEDFDFRAVVSSLNELLGIEYEGQYIDKQYEEFIPSVAPLSQDRLWQAVESLTQSNETIVAEQGTSFFGASTIPLKSNSRFIGQPLWGSIGYTFPAALGSQIADDESRHLLFIGDGSLQLTVQELGLAIREKLNPICFIINNDGYTVEREIHGPTQPYNDIPMWNYSKLPETFGATEDRVVSKIVRTENEFVSVMKEAQADVNRMYWIELVLEKNDAPKLLKKMGKLFAEQNK

SEQ ID NO: 245 - DNA, 1641 bp, Artificial Sequence
  Variant of branched-chain keto acid decarboxylase (kdcA) from Lactococcus lactis
atgtacaccgttggcgactatctgctggaccgtctgcatgaactgggaattgaagaaatctttggcgtgccgggcgattacaatctgcaattcctggatcaaatcattgcgcgcgaagatatgaaatggattggtaacgcgaatgaactgaatgcgagctacatggctgatggctatgcacgtacgaagaaggcggcggcgttcctgacgaccttcggtgttggtgaactgagcgcaatcaatgggttggcgggcagctatgcagagaacctgccagtcgtggaaatcgttgggagtccgacctcgaaggtgcagaaccgaggcaagttcgttcatcacaccctggccgacggcgacttcaagcacttcatgaagatgcacgaaccggtcaccgctgcacgtacactgctgaccgccgagaacgcgaccacagagattgaccgcgtgctgagccaactgctgaaagaacgtaaacctgtgtacatcaacctgccggttgatgtcgccgcggcgaaagccgagaaaccagctctgagcctggagaaatacagcccgacgttaaacaccacagaacaggtgatcctgtcgaagatcgaagaaagcctgaagaacgcccagaaaccggtcgtgatcgctgggcacgaggtgattagcttcggtctggagaagacggttacgcagtttgtgagtgaaaccaggctgccgattactaccctgaactttggcaaatcggctgtggatgaatccctgccgtccttcctgggtatctacaatggtaagctgagcgagattagcctcaagaactttgtggaaagcgcagacttcatcctgatgcttggtgtgaaactgacggatatcagtacgggcgcgtttacgcaccatctggacgagaacaagatgattagcctgaacattgatgaaggcatcatcttcaacaaagtcgtagaagacttcgatttccgtgcggttgttagcagcctgaacgagctgctaggcattgaatacgaaggtcaatacattgataagcagtacgaagagttcattccgagcgtcgcaccactgagccaagaccgtctgtggcaagcagtagaatctctgacacaggcgaatgaaaccattgtggcggaacagggcacgtcgttcttcggtgcctccaccatccctctgaagagcaattcacgcttcatcggtcagccgctttggggcagcatcggctatacgtttccggcagcactgggatcacagattgcggatgacgaaagtcgccatctgctgttcattggtgatggtagcctgcaactgaccgtgcaggagctgggcctggcgatccgtgagaaactgaacccgatttgtttcatcatcaacaacgatggctataccgtagagcgcgagattcatgggcctacacagccgtacaatgacatcccgatgtggaactatagcaaactgccggaaacctttggcgcgacggaagatcgcgtagttagcaagatcgttcgcacagagaacgagtttgtgagtgtcatgaaagaagcgcaggccgatgttaaccgcatgtattggattgaactggttctggagaaagaagatgcaccgaaactgctgaagaagatggggaagctgtttgcagaacagaacaaa

SEQ ID NO: 246 - protein, 547 aa, Artificial Sequence
  Variant of branched-chain keto acid decarboxylase (kdcA) from Lactococcus lactis
MYTVGDYLLDRLHELGIEEIFGVPGDYNLQFLDQIIAREDMKWIGNANELNASYMADGYARTKKAAAFLTTFGVGELSAINGLAGSYAENLPVVEIVGSPTSKVQNRGKFVHHTLADGDFKHFMKMHEPVTAARTLLTAENATTEIDRVLSQLLKERKPVYINLPVDVAAAKAEKPALSLEKYSPTLNTTEQVILSKIEESLKNAQKPVVIAGHEVISFGLEKTVTQFVSETRLPITTLNFGKSAVDESLPSFLGIYNGKLSEISLKNFVESADFILMLGVKLTDISTGAFTHHLDENKMISLNIDEGIIFNKVVEDFDFRAVVSSLNELLGIEYEGQYIDKQYEEFIPSVAPLSQDRLWQAVESLTQANETIVAEQGTSFFGASTIPLKSNSRFIGQPLWGSIGYTFPAALGSQIADDESRHLLFIGDGSLQLTVQELGLAIREKLNPICFIINNDGYTVEREIHGPTQPYNDIPMWNYSKLPETFGATEDRVVSKIVRTENEFVSVMKEAQADVNRMYWIELVLEKEDAPKLLKKMGKLFAEQNK

SEQ ID NO: 247 - DNA, 1641 bp, Artificial Sequence
  Variant of branched-chain keto acid decarboxylase (kdcA) from Lactococcus lactis
atgtacaccgttggcgactatctgctggaccgtctgcatgaactgggaattgaagaaatctttggcgtgccgggcgattacaatctgcaattcctggatcaaatcattgcgcgcgaagatatgaaatggattggtaacgcgaatgaactgaatgcgagctacatggctgatggctatgcacgtacgaagaaggcggcggcgttcctgacgaccttcggtgttggtgaactgagcgcaatcaatgggttggcgggcagctatgcagagaacctgccagtcgtggaaatcgttgggagtccgacctcgaaggtgcagaaccgaggcaagttcgttcatcacaccctggccgacggcgacttcaagcacttcatgaagatgcacgaaccggtcaccgctgcacgtacactgctgaccgccgagaacgcgaccacagagattgaccgcgtgctgagccaactgctgaaagaacgtaaacctgtgtacatcaacctgccggttgatgtcgccgcggcgaaagccgagaaaccagctctgagcctggagaaatacagcccgacgttaaacaccacagaacaggtgatcctgtcgaagatcgaagaaagcctgaagaacgcccagaaaccggtcgtgatcgctgggcacgaggtgattagcttcggtctggagaagacggttacgcagtttgtgagtgaaaccaggctgccgattactaccctgaactttggcaaatcggctgtggatgaatccctgccgtccttcctgggtatctacaatggtaagctgagcgagattagcctcaagaactttgtggaaagcgcagacttcatcctgatgcttggtgtgaaactgacggatatcagtacgggcgcgtttacgcaccatctggacgagaacaagatgattagcctgaacattgatgaaggcatcatcttcaacaaagtcgtagaagacttcgatttccgtgcggttgttagcagcctgaacgagctgctaggcattctgtacgaaggtcaatacattgataagcagtacgaagagttcattccgagcgtcgcaccactgagccaagaccgtctgtggcaagcagtagaatctctgacacagtccaatgaaaccattgtggcggaacagggcacgtcgttcttcggtgcctccaccatccctctgaagagcaattcacgcttcatcggtcagccgctttggggcagcatcggctatacgtttccggcagcactgggatcacagattgcggatgacgaaagtcgccatctgctgttcattggtgatggtagcctgcaactgaccgtgcaggagctgggcctggcgatccgtgagaaactgaacccgatttgtttcatcatcaacaacgatggctataccgtagagcgcgagattcatgggcctacacagccgtacaatgacatcccgatgtggaactatagcaaactgccggaaacctttggcgcgacggaagatcgcgtagttagcaagatcgttcgcacagagaacgagtttgtgagtgtcatgaaagaagcgcaggccgatgttaaccgcatgtattggattgaactggttctggagaaagaagatgcaccgaaactgctgaagaagatggggaagctgtttgcagaacagaacaaa

SEQ ID NO: 248 - protein, 547 aa, Artificial Sequence; identical to SEQ ID NO: 230
  Variant of branched-chain keto acid decarboxylase (kdcA) from Lactococcus lactis

SEQ ID NO: 249 - DNA, 1641 bp, Artificial Sequence
  Variant of branched-chain keto acid decarboxylase (kdcA) from Lactococcus lactis
atgtacaccgttggcgactatctgctggaccgtctgcatgaactgggaattgaagaaatctttggcgtgccgggcgattacaatctgcaattcctggatcaaatcattgcgcgcgaagatatgaaatggattggtaacgcgaatgaactgaatgcgagctacatggctgatggctatgcacgtacgaagaaggcggcggcgttcctgacgaccttcggtgttggtgaactgagcgcaatcaatgggttggcgggcagctatgcagagaacctgccagtcgtggaaatcgttgggagtccgacctcgaaggtgcagaaccgaggcaagttcgttcatcacaccctggccgacggcgacttcaagcacttcatgaagatgcacgaaccggtcaccgctgcacgtacactgctgaccgccgagaacgcgaccacagagattgaccgcgtgctgagccaactgctgaaagaacgtaaacctgtgtacatcaacctgccggttgatgtcgccgcggcgaaagccgagaaaccagctctgagcctggagaaatacagcccgacgttaaacaccacagaacaggtgatcctgtcgaagatcgaagaaagcctgaagaacgcccagaaaccggtcgtgatcgctgggcacgaggtgattagcttcggtctggagaagacggttacgcagtttgtgagtgaaaccaggctgccgattactaccctgaactttggcaaatcggctgtggatgaatccctgccgtccttcctgggtatctacaatggtaagctgagcgagattagcctcaagaactttgtggaaagcgcagacttcatcctgatgcttggtgtgaaactgacggatatcagtacgggcgcgtttacgcaccatctggacgagaacaagatgattagcctgaacattgatgaaggcatcatcttcaacaaagtcgtagaagacttcgatttccgtgcggttgttagcagcctgaacgagctgctaggcattgaatacgaaggtcaatacattgataagcagtacgaagagttcattccgagcgtcgcaccactgagccaagaccgtctgtggcaagcagtagaatctctgacacagtccaatgaaaccattgtggcggaacagggcacgtcgttcttcggtgcctccaccatccctctgaagagcatgtcacgcttcatcggtcagccgctttggggcagcatcggctatacgtttccggcagcactgggatcacagattgcggatgacgaaagtcgccatctgctgttcattggtgatggtagcctgcaactgaccgtgcaggagctgggcctggcgatccgtgagaaactgaacccgatttgtttcatcatcaacaacgatggctataccgtagagcgcgagattcatgggcctacacagccgtacaatgacatcccgatgtggaactatagcaaactgccggaaacctttggcgcgacggaagatcgcgtagttagcaagatcgttcgcacagagaacgagtttgtgagtgtcatgaaagaagcgcaggccgatgttaaccgcatgtattggattgaactggttctggagaaagaagatgcaccgaaactgctgaagaagatggggaagctgtttgcagaacagaacaaa

SEQ ID NO: 250 - protein, 547 aa, Artificial Sequence
  Variant of branched-chain keto acid decarboxylase (kdcA) from Lactococcus lactis
MYTVGDYLLDRLHELGIEEIFGVPGDYNLQFLDQIIAREDMKWIGNANELNASYMADGYARTKKAAAFLTTFGVGELSAINGLAGSYAENLPVVEIVGSPTSKVQNRGKFVHHTLADGDFKHFMKMHEPVTAARTLLTAENATTEIDRVLSQLLKERKPVYINLPVDVAAAKAEKPALSLEKYSPTLNTTEQVILSKIEESLKNAQKPVVIAGHEVISFGLEKTVTQFVSETRLPITTLNFGKSAVDESLPSFLGIYNGKLSEISLKNFVESADFILMLGVKLTDISTGAFTHHLDENKMISLNIDEGIIFNKVVEDFDFRAVVSSLNELLGIEYEGQYIDKQYEEFIPSVAPLSQDRLWQAVESLTQSNETIVAEQGTSFFGASTIPLKSMSRFIGQPLWGSIGYTFPAALGSQIADDESRHLLFIGDGSLQLTVQELGLAIREKLNPICFIINNDGYTVEREIHGPTQPYNDIPMWNYSKLPETFGATEDRVVSKIVRTENEFVSVMKEAQADVNRMYWIELVLEKEDAPKLLKKMGKLFAEQNK

SEQ ID NO: 251 - DNA, 1641 bp, Artificial Sequence
  Variant of branched-chain keto acid decarboxylase (kdcA) from Lactococcus lactis
atgtacaccgttggcgactatctgctggaccgtctgcatgaactgggaattgaagaaatctttggcgtgccgggcgattacaatctgcaattcctggatcaaatcattgcgcgcgaagatatgaaatggattggtaacgcgaatgaactgaatgcgagctacatggctgatggctatgcacgtacgaagaaggcggcggcgttcctgacgaccttcggtgttggtgaactgagcgcaatcaatgggttggcgggcagctatgcagagaacctgccagtcgtggaaatcgttgggagtccgacctcgaaggtgcagaaccgaggcaagttcgttcatcacaccctggccgacggcgacttcaagcacttcatgaagatgcacgaaccggtcaccgctgcacgtacactgctgaccgccgagaacgcgaccacagagattgaccgcgtgctgagccaactgctgaaagaacgtaaacctgtgtacatcaacctgccggttgatgtcgccgcggcgaaagccgagaaaccagctctgagcctggagaaatacagcccgacgttaaacgaaacagaacaggtaatcctgtcgaagatcgaagaaagcctgaagaacgcccagaaaccggtcgtgatcgctgggcacgaggtgattagcttcggtctggagaagacggttacgcagtttgtgagtgaaaccaggctgccgattactaccctgaactttggcaaatcggctgtggatgaatccctgccgtccttcctgggtatctacaatggtaagctgagcgagattagcctcaagaactttgtggaaagcgcagacttcatcctgatgcttggtgtgaaactgacggatatcagtacgggcgcgtttacgcaccatctggacgagaacaagatgattagcctgaacattgatgaaggcatcatcttcaacaaagtcgtagaagacttcgatttccgtgcggttgttagcagcctgaacgagctgctaggcattgaatacgaaggtcaatacattgataagcagtacgaagagttcattccgagcgtcgcaccactgagccaagaccgtctgtggcaagcagtagaatctctgacacagtccaatgaaaccattgtggcggaacagggcacgtcgttcttcggtgcctccaccatccctctgaagagcaattcacgcttcatcggtcagccgctttggggcagcatcggctatacgtttccggcagcactgggatcacagattgcggatgacgaaagtcgccatctgctgttcattggtgatggtagcctgcaactgaccgtgcaggagctgggcctggcgatccgtgagaaactgaacccgatttgtttcatcatcaacaacgatggctataccgtagagcgcgagattcatgggcctacacagccgtacaatgacatcccgatgtggaactatagcaaactgccggaaacctttggcgcgacggaagatcgcgtagttagcaagatagttcgcacagagaacgagtttgtgagtgtcatgaaagaagcgcaggccgatgttaaccgcatgtattggattgaactggttctggaaaaagaagatgcaccgaaactgctgaagaagatggggaagctgtttgcagaacagaacaaa

SEQ ID NO: 252 - protein, 547 aa, Artificial Sequence
  Variant of branched-chain keto acid decarboxylase (kdcA) from Lactococcus lactis
MYTVGDYLLDRLHELGIEEIFGVPGDYNLQFLDQIIAREDMKWIGNANELNASYMADGYARTKKAAAFLTTFGVGELSAINGLAGSYAENLPVVEIVGSPTSKVQNRGKFVHHTLADGDFKHFMKMHEPVTAARTLLTAENATTEIDRVLSQLLKERKPVYINLPVDVAAAKAEKPALSLEKYSPTLNETEQVILSKIEESLKNAQKPVVIAGHEVISFGLEKTVTQFVSETRLPITTLNFGKSAVDESLPSFLGIYNGKLSEISLKNFVESADFILMLGVKLTDISTGAFTHHLDENKMISLNIDEGIIFNKVVEDFDFRAVVSSLNELLGIEYEGQYIDKQYEEFIPSVAPLSQDRLWQAVESLTQSNETIVAEQGTSFFGASTIPLKSNSRFIGQPLWGSIGYTFPAALGSQIADDESRHLLFIGDGSLQLTVQELGLAIREKLNPICFIINNDGYTVEREIHGPTQPYNDIPMWNYSKLPETFGATEDRVVSKIVRTENEFVSVMKEAQADVNRMYWIELVLEKEDAPKLLKKMGKLFAEQNK

SEQ ID NO: 253 - DNA, 1641 bp, Artificial Sequence
  Variant of branched-chain keto acid decarboxylase (kdcA) from Lactococcus lactis
atgtacaccgttggcgactatctgctggaccgtctgcatgaactgggaattgaagaaatctttggcgtgccgggcgattacaatctgcaattcctggatcaaatcattgcgcgcgaagatatgaaatggattggtaacgcgaatgaactgaatgcgagctacatggctgatggctatgcacgtacgaagaaggcggcggcgttcctgacgaccttcggtgttggtgaactgagcgcaatcaatgggttggcgggcagctatgcagagaacctgccagtcgtggaaatcgttgggagtccgacctcgaaggtgcagaaccgaggcaagttcgttcatcacaccctggccgacggcgacttcaagcacttcatgaagatgcacgaaccggtcaccgctgcacgtacactgctgaccgccgagaacgcgaccacagagattgaccgcgtgctgagccaactgctgaaagaacgtaaacctgtgtacatcaacctgccggttgatgtcgccgcggcgaaagccgagaaacccgctctgagcctggagaaatacagcccgacgttaaacaccacagaacaggtgatcctgtcgaagatcgaagaaagcctgaagaacgcccagaaaccggtcgtgatcgctgggcacgaggtgattagcttcggtctggagaagacggttacgcagtttgtgagtgaaaccaggctgccgattactaccctgaactttggcaaatcggctgtggatgaatccctgccgtccttcctgggtatctacaatggtaagctgagcgagattagcctcaagaactttgtggaaagcgcagacttcatcctgatgcttggtgtgaaactgacggatatcagtacgggcgcgtttacgcaccatctggacgagaacaagatgattagcctgaacattgatgaaggcatcatcttcaacaaagtcgtagaagacttcgatttccgtgcggttgttagcagcctgaacgagctgctaggcattgaatacgaaggtcaatacattgataagcagtacgaagagttcattccgagcgtcgcaccactgagccaagaccgtctgtggcaagcagtagaatctctgacacagtccaatgaaaccattgtggcggaacagggcacgtcgttcttcggtgcctccaccatccctctgaagagcaattcacgcttcatcggtcagccgctttggggcagcatcggctatacgtttccggcagcactgggatcacagattgcggatgacgaaagtcgccatctgctgttcattggtgatggtagcctgcaactgaccgtgcaggagctgggcctggcgatccgtgagaaactgaacccgatttgtttcatcatcaacaacgatggctataccgtagagcgcgagattcatgggcctacacagccgtacaatgacatcccgatgtggaactatagcaaactgccggaaacctttggcgcgacggaagatcgcgtagttagcaagatcgttcgcacagagaacgagtttgtgagtgtcatgaaagaagcgcaggccgatgcgaaccgcatgtattggattgaactggttctggagaaagaagatgcaccgaaactgctgaagaagatggggaagctgtttgcagaacagaacaaa

SEQ ID NO: 254 - protein, 547 aa, Artificial Sequence
  Variant of branched-chain keto acid decarboxylase (kdcA) from Lactococcus lactis
MYTVGDYLLDRLHELGIEEIFGVPGDYNLQFLDQIIAREDMKWIGNANELNASYMADGYARTKKAAAFLTTFGVGELSAINGLAGSYAENLPVVEIVGSPTSKVQNRGKFVHHTLADGDFKHFMKMHEPVTAARTLLTAENATTEIDRVLSQLLKERKPVYINLPVDVAAAKAEKPALSLEKYSPTLNTTEQVILSKIEESLKNAQKPVVIAGHEVISFGLEKTVTQFVSETRLPITTLNFGKSAVDESLPSFLGIYNGKLSEISLKNFVESADFILMLGVKLTDISTGAFTHHLDENKMISLNIDEGIIFNKVVEDFDFRAVVSSLNELLGIEYEGQYIDKQYEEFIPSVAPLSQDRLWQAVESLTQSNETIVAEQGTSFFGASTIPLKSNSRFIGQPLWGSIGYTFPAALGSQIADDESRHLLFIGDGSLQLTVQELGLAIREKLNPICFIINNDGYTVEREIHGPTQPYNDIPMWNYSKLPETFGATEDRVVSKIVRTENEFVSVMKEAQADANRMYWIELVLEKEDAPKLLKKMGKLFAEQNK

SEQ ID NO: 255 - DNA, 1641 bp, Artificial Sequence
  Variant of branched-chain keto acid decarboxylase (kdcA) from Lactococcus lactis
atgtacaccgttggcgactatctgctggaccgtctgcatgaactgggaattgaagaaatctttggcgtgccgggcgattacaatctgcaattcctggatcaaatcattgcgcgcgaagatatgaaatggattggtaacgcgaatgaactgaatgcgagctacatggctgatggctatgcacgtacgaagaaggcggcggcgttcctgacgaccttcggtgttggtgaactgagcgcaatcaatgggttggcgggcagctatgcagagaacctgccagtcgtggaaatcgttgggagtccgacctcgaaggtgcagaaccgaggcaagttcgttcatcacaccctggccgacggcgacttcaagcacttcatgaagatgcacgaaccggtcaccgctgcacgtacactgctgaccgccgagaacgcgaccacagagattgaccgcgtgctgagccaactgctgaaagaacgtaaacctgtgtacatcaacctgccggttgatgtcgccgcggcgaaagccgagaaaccagctctgagcctggagaaatacagcccgacgttaaacaccacagaacaggtgatcctgtcgaagatcgaagaaagcctgaagaacgcccagaaaccggtcgtgatcgctgggcacgaggtgattagcttcggtctggagaagacggttacgcagtttgtgagtgaaaccaggctgccgattactaccctgaactttggcaaatcggctgtggatgaatccctgccgtccttcctgggtatctacaatggtaagctgagcgagattagcctcaagaactttgtggaaagcgcagacttcatcctgatgcttggtgtgaaactgacggatatcagtacgggcgcgtttacgcaccatctggacgagaacaagatgattagcctgaacattgatgaaggcatcatcttcaacaaagtcgtagaagacttcgatttccgtgcggttgttagcagcctgaacgagctgctaggcattgaatacgaaggtcaatacattgataagcagtacgaagttttcattccgagcgtcgcaccactgagccaagaccgtctgtggcaagcagtagaatctctgacacagtccaatgaaaccattgtggcggaacagggcacgtcgttcttcggtgcctccaccatccctctgaagagcaattcacgcttcatcggtcagccgctttggggcagcatcggctatacgtttccggcagcactgggatcacagattgcggatgacgaaagtcgccatctgctgttcattggtgatggtagcctgcaactgaccgtgcaggagctgggcctggcgatccgtgagaaactgaacccgatttgtttcatcatcaacaacgatggctataccgtagagcgcgagattcatgggcctacacagccgtacaatgacatcccgatgtggaactatagcaaactgccggaaacctttggcgcgacggaagatcgcgtagttagcaagatcgttcgcacagagaacgagtttgtgagtgtcatgaaagaagcgcaggccgatgttaaccgcatgtattggattgaactggttctggagaaagaagatgcaccgaaactgctgaagaagatggggaagctgtttgcagaacagaacaaa

SEQ ID NO: 256 - protein, 547 aa, Artificial Sequence
  Variant of branched-chain keto acid decarboxylase (kdcA) from Lactococcus lactis
MYTVGDYLLDRLHELGIEEIFGVPGDYNLQFLDQIIAREDMKWIGNANELNASYMADGYARTKKAAAFLTTFGVGELSAINGLAGSYAENLPVVEIVGSPTSKVQNRGKFVHHTLADGDFKHFMKMHEPVTAARTLLTAENATTEIDRVLSQLLKERKPVYINLPVDVAAAKAEKPALSLEKYSPTLNTTEQVILSKIEESLKNAQKPVVIAGHEVISFGLEKTVTQFVSETRLPITTLNFGKSAVDESLPSFLGIYNGKLSEISLKNFVESADFILMLGVKLTDISTGAFTHHLDENKMISLNIDEGIIFNKVVEDFDFRAVVSSLNELLGIEYEGQYIDKQYEVFIPSVAPLSQDRLWQAVESLTQSNETIVAEQGTSFFGASTIPLKSNSRFIGQPLWGSIGYTFPAALGSQIADDESRHLLFIGDGSLQLTVQELGLAIREKLNPICFIINNDGYTVEREIHGPTQPYNDIPMWNYSKLPETFGATEDRVVSKIVRTENEFVSVMKEAQADVNRMYWIELVLEKEDAPKLLKKMGKLFAEQNK

SEQ ID NO: 257 - DNA, 1641 bp, Artificial Sequence
  Variant of branched-chain keto acid decarboxylase (kdcA) from Lactococcus lactis
atgtacaccgttggcgactatctgctggaccgtctgcatgaactgggaattgaagaaatctttggcgtgccgggcgattacaatctgcaattcctggatcaaatcattgcgcgcgaagatatgaaatggattggtaacgcgaatgaactgaatgcgagctacatggctgatggctatgcacgtacgaagaaggcggcggcgttcctgacgaccttcggtgttggtgaactgagcgcaatcaatgggttggcgggcagctatgcagagaacctgccagtcgtggaaatcgttgggagtccgacctcgaaggtgcagaaccgaggcaagttcgttcatcacaccctggccgacggcgacttcaagcacttcatgaagatgcacgaaccggtcaccgctgcacgtacactgctgaccgccgagaacgcgaccacagagattgaccgcgtgctgagccaactgctgaaagaacgtaaacctgtgtacatcaacctgccggttgatgtcgccgcggcgaaagccgagaaaccagctctgagcctggagaaatacagcccgacgttaaacaccacagaacaggtgatcctgtcgaagatcgaagaaagcctgaagaacgcccagaaaccggtcgtgatcgctgggcacgaggtgattagcttcggtctggagaagacggttacgcagtttgtgagtgaaaccaggctgccgattactaccctgaactttggcaaatcggctgtggatgaatccctgccgtccttcctgggtatctacaatggtaagctgagcgagattagcctcaagaactttgtggaaagcgcagacttcatcctgatgcttggtgtgaaactgacggatatcagtacgggcgcgtttacgcaccatctggacgagaacaagatgattagcctgaacattgatgaaggcatcatcttcaacaaagtcgtagaagacttcgatttccgtgcggttgttagcagcctgaacgagctgctaggcattgaatacgaaggtcaatacattgataagcagtacgaagagttcattccgagcgtcgcaccactgagccaagaccgtctgtggcaagcagtagaatctctgacacagtccaatgaaaccattgtggcggaacagggcacgtcgttcttcggtgcctccaccatccctctgaagagcgcgtcacgcttcatcggtcagccgctttggggcagcatcggctatacgtttccggcagcactgggatcacagattgcggatgacgaaagtcgccatctgctgttcattggtgatggtagcctgcaactgaccgtgcaggagctgggcctggcgatccgtgagaaactgaacccgatttgtttcatcatcaacaacgatggctataccgtagagcgcgagattcatgggcctacacagccgtacaatgacatcccgatgtggaactatagcaaactgccggaaacctttggcgcgacggaagatcgcgtagttagcaagatcgttcgcacagagaacgagtttgtgagtgtcatgaaagaagcgcaggccgatgttaaccgcatgtattggattgaactggttctggagaaagaagatgcaccgaaactgctgaagaagatggggaagctgtttgcagaacagaacaaa

SEQ ID NO: 258 - protein, 547 aa, Artificial Sequence
  Variant of branched-chain keto acid decarboxylase (kdcA) from Lactococcus lactis
MYTVGDYLLDRLHELGIEEIFGVPGDYNLQFLDQIIAREDMKWIGNANELNASYMADGYARTKKAAAFLTTFGVGELSAINGLAGSYAENLPVVEIVGSPTSKVQNRGKFVHHTLADGDFKHFMKMHEPVTAARTLLTAENATTEIDRVLSQLLKERKPVYINLPVDVAAAKAEKPALSLEKYSPTLNTTEQVILSKIEESLKNAQKPVVIAGHEVISFGLEKTVTQFVSETRLPITTLNFGKSAVDESLPSFLGIYNGKLSEISLKNFVESADFILMLGVKLTDISTGAFTHHLDENKMISLNIDEGIIFNKVVEDFDFRAVVSSLNELLGIEYEGQYIDKQYEEFIPSVAPLSQDRLWQAVESLTQSNETIVAEQGTSFFGASTIPLKSASRFIGQPLWGSIGYTFPAALGSQIADDESRHLLFIGDGSLQLTVQELGLAIREKLNPICFIINNDGYTVEREIHGPTQPYNDIPMWNYSKLPETFGATEDRVVSKIVRTENEFVSVMKEAQADVNRMYWIELVLEKEDAPKLLKKMGKLFAEQNK

SEQ ID NO: 259 - DNA, 1641 bp, Artificial Sequence
  Variant of branched-chain keto acid decarboxylase (kdcA) from Lactococcus lactis
atgtacaccgttggcgactatctgctggaccgtctgcatgaactgggaattgaagaaatctttggcgtgccgggcgattacaatctgcaattcctggatcaaatcattgcgcgcgaagatatgaaatggattggtaacgcgaatgaactgaatgcgagctacatggctgatggctatgcacgtacgaagaaggcggcggcgttcctgacgaccttcggtgttggtgaactgagcgcaatcaatgggttggcgggcagctatgcagagaacctgccagtcgtggaaatcgttgggagtccgacctcgaaggtgcagaaccgaggcaagttcgttcatcacaccctggccgacggcgacttcaagcacttcatgaagatgcacgaaccggtcaccgctgcacgtacactgctgaccgccgagaacgcgaccacagagattgaccgcgtgctgagccaactgctgaaagaacgtaaacctgtgtacatcaacctgccggttgatgtcgccgcggcgaaagccgagaaaccagctctgagcctggagaaatacagcccgacgttaaacaccacagaacaggtgatcctgtcgaagatcgaagaaagcctgaagaacgcccagaaaccggtcgtgatcgctgggcacgaggtgattagcttcggtctggagaagacggttacgcagtttgtgagtgaaaccaggctgccgattactaccctgaactttggcaaatcggctgtggatgaatccctgccgtccttcctgggtatctacaatggtaagctgagcgagattagcctcaagaactttgtggaaagcgcagacttcatcctgatgcttggtgtgaaactgacggatatcagtacgggcgcgtttacgcaccatctggacgagaacaagatgattagcctgaacattgatgaaggcatcatcttcaacaaagtcgtagaagacttcgatttccgtgcggttgttagcagcctgaacgagctgctaggcattgaatacgaaggtcaatacattgataagcagtacgaagagttcattccgagcgtcgcaccactgagccaagaccgtctgtggcaagcagtagaatctctgacacagtccaatgaaaccattgtggcggaacagggcacgtcgttcttcggtgcctccaccatccctctgaagagcgggtcacgcttcatcggtcagccgctttggggcagcatcggctatacgtttccggcagcactgggatcacagattgcggatgacgaaagtcgccatctgctgttcattggtgatggtagcctgcaactgaccgtgcaggagctgggcctggcgatccgtgagaaactgaacccgatttgtttcatcatcaacaacgatggctataccgtagagcgcgagattcatgggcctacacagccgtacaatgacatcccgatgtggaactatagcaaactgccggaaacctttggcgcgacggaagatcgcgtagttagcaagatcgttcgcacagagaacgagtttgtgagtgtcatgaaagaagcgcaggccgatgttaaccgcatgtattggattgaactggttctggagaaagaagatgcaccgaaactgctgaagaagatggggaagctgtttgcagaacagaacaaa

SEQ ID NO: 260 - protein, 547 aa, Artificial Sequence
  Variant of branched-chain keto acid decarboxylase (kdcA) from Lactococcus lactis
MYTVGDYLLDRLHELGIEEIFGVPGDYNLQFLDQIIAREDMKWIGNANELNASYMADGYARTKKAAAFLTTFGVGELSAINGLAGSYAENLPVVEIVGSPTSKVQNRGKFVHHTLADGDFKHFMKMHEPVTAARTLLTAENATTEIDRVLSQLLKERKPVYINLPVDVAAAKAEKPALSLEKYSPTLNTTEQVILSKIEESLKNAQKPVVIAGHEVISFGLEKTVTQFVSETRLPITTLNFGKSAVDESLPSFLGIYNGKLSEISLKNFVESADFILMLGVKLTDISTGAFTHHLDENKMISLNIDEGIIFNKVVEDFDFRAVVSSLNELLGIEYEGQYIDKQYEEFIPSVAPLSQDRLWQAVESLTQSNETIVAEQGTSFFGASTIPLKSGSRFIGQPLWGSIGYTFPAALGSQIADDESRHLLFIGDGSLQLTVQELGLAIREKLNPICFIINNDGYTVEREIHGPTQPYNDIPMWNYSKLPETFGATEDRVVSKIVRTENEFVSVMKEAQADVNRMYWIELVLEKEDAPKLLKKMGKLFAEQNK

SEQ ID NO: 261 - DNA, 1641 bp, Artificial Sequence
  Variant of branched-chain keto acid decarboxylase (kdcA) from Lactococcus lactis
atgtacaccgttggcgactatctgctggaccgtctgcatgaactgggaattgaagaaatctttggcgtgccgggcgattacaatctgcaattcctggatcaaatcattgcgcgcgaagatatgaaatggattggtaacgcgaatgaactgaatgcgagctacatggctgatggctatgcacgtacgaagaaggcggcggcgttcctgacgaccttcggtgttggtgaactgagcgcaatcaatgggttggcgggcagctatgcagagaacctgccagtcgtggaaatcgttgggagtccgacctcgaaggtgcagaaccgaggcaagttcgttcatcacaccctggccgacggcgacttcaagcacttcatgaagatgcacgaaccggtcaccgctgcacgtacactgctgaccgccgagaacgcgaccacagagattgaccgcgtgctgagccaactgctgaaagaacgtaaacctgtgtacatcaacctgccggttgatgtcgccgcggcgaaagccgagaaaccagctctgagcctggagaaatacagcccgacgttaaacaccacagaacaggtgatcctgtcgaagatcgaagaaagcctgaagaacgcccagaaaccggtcgtgatcgctgggcacgaggtgattagcttcggtctggagaagacggttacgcagtttgtgagtgaaaccaggctgccgattactaccctgaactttggcaaatcggctgtggatgaatccctgccgtccttcctgggtatctacaatggtaagctgagcgagattagcctcaagaactttgtggaaagcgcagacttcatcctgatgcttggtgtgaaactgacggatatcagtacgggcgcgtttacgcaccatctggacgagaacaagatgattagcctgaacattgatgaaggcatcatcttcaacaaaagtgtagaagacttcgatttccgtgcggttgttagcagcctgaacgagctgctaggcattgaatacgaaggtcaatacattgataagcagtacgaagagttcattccgagcgtcgcaccactgagccaagaccgtctgtggcaagcagtagaatctctgacacagtccaatgaaaccattgtggcggaacagggcacgtcgttcttcggtgcctccaccatccctctgaagagcaattcacgcttcatcggtcagccgctttggggcagcatcggctatacgtttccggcagcactgggatcacagattgcggatgacgaaagtcgccatctgctgttcattggtgatggtagcctgcaactgaccgtgcaggagctgggcctggcgatccgtgagaaactgaacccgatttgtttcatcatcaacaacgatggctataccgtagagcgcgagattcatgggcctacacagccgtacaatgacatcccgatgtggaactatagcaaactgccggaaacctttggcgcgacggaagatcgcgtagttagcaagatcgttcgcacagagaacgagtttgtgagtgtcatgaaagaagcgcaggccgatgttaaccgcatgtattggattgaactggttctggagaaagaagatgcaccgaaactgctgaagaagatggggaagctgtttgcagaacagaacaaa

SEQ ID NO: 262 - protein, 547 aa, Artificial Sequence
  Variant of branched-chain keto acid decarboxylase (kdcA) from Lactococcus lactis
MYTVGDYLLDRLHELGIEEIFGVPGDYNLQFLDQIIAREDMKWIGNANELNASYMADGYARTKKAAAFLTTFGVGELSAINGLAGSYAENLPVVEIVGSPTSKVQNRGKFVHHTLADGDFKHFMKMHEPVTAARTLLTAENATTEIDRVLSQLLKERKPVYINLPVDVAAAKAEKPALSLEKYSPTLNTTEQVILSKIEESLKNAQKPVVIAGHEVISFGLEKTVTQFVSETRLPITTLNFGKSAVDESLPSFLGIYNGKLSEISLKNFVESADFILMLGVKLTDISTGAFTHHLDENKMISLNIDEGIIFNKSVEDFDFRAVVSSLNELLGIEYEGQYIDKQYEEFIPSVAPLSQDRLWQAVESLTQSNETIVAEQGTSFFGASTIPLKSNSRFIGQPLWGSIGYTFPAALGSQIADDESRHLLFIGDGSLQLTVQELGLAIREKLNPICFIINNDGYTVEREIHGPTQPYNDIPMWNYSKLPETFGATEDRVVSKIVRTENEFVSVMKEAQADVNRMYWIELVLEKEDAPKLLKKMGKLFAEQNK

SEQ ID NO: 263 - DNA, 1641 bp, Artificial Sequence
  Variant of branched-chain keto acid decarboxylase (kdcA) from Lactococcus lactis
atgtacaccgttggcgactatctgctggaccgtctgcatgaactgggaattgaagaaatctttggcgtgccgggcgattacaatctgcaattcctggatcaaatcattgcgcgcgaagatatgaaatggattggtaacgcgaatgaactgaatgcgagctacatggctgatggctatgcacgtacgaagaaggcggcggcgttcctgacgaccttcggtgttggtgaactgagcgcaatcaatgggttggcgggcagctatgcagagaacctgccagtcgtggaaatcgttgggagtccgacctcgaaggtgcagaaccgaggcaagttcgttcatcacaccctggccgacggcgacttcaagcacttcatgaagatgcacgaaccggtcaccgctgcacgtacactgctgaccgccgagaacgcgaccacagagattgaccgcgtgctgagccaactgctgaaagaacgtaaacctgtgtacatcaacctgccggttgatgtcgccgcggcgaaagccgagaaaccagctctgagcctggagaaatacagcccgacgttaaacaccacagaacaggtgatcctgtcgaagatcgaagaaagcctgaagaacgcccagaaaccggtcgtgatcgctgggcacgaggtgattagcttcggtctggagaagacggttacgcagtttgtgagtgaaaccaggctgccgattactaccctgaactttggcaaatcggctgtggatgaagcgctgccgtccttcctgggtatctacaatggtaagctgagcgagattagcctcaagaactttgtggaaagcgcagacttcatcctgatgcttggtgtgaaactgacggatatcagtacgggcgcgtttacgcaccatctggacgagaacaagatgattagcctgaacattgatgaaggcatcatcttcaacaaagtcgtagaagacttcgatttccgtgcggttgttagcagcctgaacgagctgctaggcattgaatacgaaggtcaatacattgataagcagtacgaagagttcattccgagcgtcgcaccactgagccaagaccgtctgtggcaagcagtagaatctctgacacagtccaatgaaaccattgtggcggaacagggcacgtcgttcttcggtgcctccaccatccctctgaagagcaattcacgcttcatcggtcagccgctttggggcagcatcggctatacgtttccggcagcactgggatcacagattgcggatgacgaaagtcgccatctgctgttcattggtgatggtagcctgcaactgaccgtgcaggagctgggcctggcgatccgtgagaaactgaacccgatttgtttcatcatcaacaacgatggctataccgtagagcgcgagattcatgggcctacacagccgtacaatgacatcccgatgtggaactatagcaaactgccggaaacctttggcgcgacggaagatcgcgtagttagcaagatcgttcgcacagagaacgagtttgtgagtgtcatgaaagaagcgcaggccgatgttaaccgcatgtattggattgaactggttctggagaaagaagatgcaccgaaactgctgaagaagatggggaagctgtttgcagaacagaacaaa

SEQ ID NO: 264 - protein, 547 aa, Artificial Sequence
  Variant of branched-chain keto acid decarboxylase (kdcA) from Lactococcus lactis
MYTVGDYLLDRLHELGIEEIFGVPGDYNLQFLDQIIAREDMKWIGNANELNASYMADGYARTKKAAAFLTTFGVGELSAINGLAGSYAENLPVVEIVGSPTSKVQNRGKFVHHTLADGDFKHFMKMHEPVTAARTLLTAENATTEIDRVLSQLLKERKPVYINLPVDVAAAKAEKPALSLEKYSPTLNTTEQVILSKIEESLKNAQKPVVIAGHEVISFGLEKTVTQFVSETRLPITTLNFGKSAVDEALPSFLGIYNGKLSEISLKNFVESADFILMLGVKLTDISTGAFTHHLDENKMISLNIDEGIIFNKVVEDFDFRAVVSSLNELLGIEYEGQYIDKQYEEFIPSVAPLSQDRLWQAVESLTQSNETIVAEQGTSFFGASTIPLKSNSRFIGQPLWGSIGYTFPAALGSQIADDESRHLLFIGDGSLQLTVQELGLAIREKLNPICFIINNDGYTVEREIHGPTQPYNDIPMWNYSKLPETFGATEDRVVSKIVRTENEFVSVMKEAQADVNRMYWIELVLEKEDAPKLLKKMGKLFAEQNK

SEQ ID NO: 265 - DNA, 1641 bp, Artificial Sequence
  Variant of branched-chain keto acid decarboxylase (kdcA) from Lactococcus lactis
atgtacaccgttggcgactatctgctggaccgtctgcacgaactgggaattgatgaaatctttggcgtgccgggcgattacaatctgcaattcctggatcaaatcattgcgcgcgaagatatgaaatggattggtaacgcgaatgaactgaatgcgagctacatggctgatggctatgcacgtacgaagaaggcggcggcgttcctgacgaccttcggtgttggtgaactgagcgcaatcaatgggttggcgggcagctatgcagagaacctgccagtcgtggaaatcgttgggagtccgacctcgaaggtgcagaaccgaggcaagttcgttcatcacaccctggccgacggcgacttcaagcacttcatgaagatgcacgaaccggtcaccgctgcacgtacactgctgaccgccgagaacgcgaccacagagattgaccgcgtgctgagccaactgctgaaagaacgtaaacctgtgtacatcaacctgccggttgatgtcgccgcggcgaaagccgagaaaccagctctgagcctggagaaatacagcccgacgttaaacgaaacagaacaggaaatcctgtcgaagatcgaagaaagcctgaaaaacgcccagaaaccggtcgtgatcgctgggcacgaggtgattagcttcggtctggagaagacggttacgcagtttgtgagtgaaaccaggctgccgattactaccctgaactttggcaaatcggctgtggatgaatccctgccgtccttcctgggtatctacaatggttcgctgagcgagattagcctcaagaactttgtggaaagcgcagacttcatcctgatgcttggtgtgaaactgacggatatcagtacgggcgcgtttacgcaccatctggacgagaacaagatgattagcctgaacattgatgaaggcatcatcttcaacaaagtcgtagaagacttcgatttccgtgcggttgttagcagcctgctcgagctgctaggcattgaatacgaaggtcaatacattgataagcagtacgaagagttcattccgagcgtcgcaccactgagccaagaccgtctgtggcaagcagtagaatctctgacacagtccaatgaaaccattgtggcggaacagggcacgtcgttcttcggtgcctccaccatccctctgaagagcaattcacgcttcatcggtcagccgctttggggcagcatcggctatacgtttccggcagcactgggatcacagattgcggatgacgaaagtcgccatctgctgttcattggtgatggtagcctgcaactgaccgtgcaggagctgggcctggcgatccgtgagaaactgaacccgatttgtttcatcatcaacaacgatggctataccgtagagcgcgagattcatgggcctacacagccgtacaatgacatcccgatgtggaactatagcaaactgccggaaacctttggcgcgacggaagatcgcgtagttagcaagatagttcgcacagagaacgagtttgtgagtgtcatgaaagaagcgcaggccgatgttaaccgcatgtattggattgaactggttctggaaaaagaagatgcaccgaaactgctgaagaagatggggaagctgtttgcagaacagaacaaa

SEQ ID NO: 266 - protein, 547 aa, Artificial Sequence
  Variant of branched-chain keto acid decarboxylase (kdcA) from Lactococcus lactis
MYTVGDYLLDRLHELGIDEIFGVPGDYNLQFLDQIIAREDMKWIGNANELNASYMADGYARTKKAAAFLTTFGVGELSAINGLAGSYAENLPVVEIVGSPTSKVQNRGKFVHHTLADGDFKHFMKMHEPVTAARTLLTAENATTEIDRVLSQLLKERKPVYINLPVDVAAAKAEKPALSLEKYSPTLNETEQEILSKIEESLKNAQKPVVIAGHEVISFGLEKTVTQFVSETRLPITTLNFGKSAVDESLPSFLGIYNGSLSEISLKNFVESADFILMLGVKLTDISTGAFTHHLDENKMISLNIDEGIIFNKVVEDFDFRAVVSSLLELLGIEYEGQYIDKQYEEFIPSVAPLSQDRLWQAVESLTQSNETIVAEQGTSFFGASTIPLKSNSRFIGQPLWGSIGYTFPAALGSQIADDESRHLLFIGDGSLQLTVQELGLAIREKLNPICFIINNDGYTVEREIHGPTQPYNDIPMWNYSKLPETFGATEDRVVSKIVRTENEFVSVMKEAQADVNRMYWIELVLEKEDAPKLLKKMGKLFAEQNK

SEQ ID NO: 267 - DNA, 1641 bp, Artificial Sequence
  Variant of branched-chain keto acid decarboxylase (kdcA) from Lactococcus lactis
atgtacaccgttggcgactatctgctggaccgtctgcatgaactgggaattgaagaaatctttggcgtgccgggcgattacaatctgcaattcctggatcaaatcattgcgcgcgaagatatgaaatggattggtaacgcgaatgaactgaatgcgagctacatggctgatggctatgcacgtacgaagaaggcggcggcgttcctgacgaccttcggtgttggtgaactgagcgcaatcaatgggttggcgggcagctatgcagagaacctgccagtcgtggaaatcgttgggagtccgacctcgaaggtgcagaaccgaggcaagttcgttcatcacaccctggccgacggcgacttcaagcacttcatgaagatgcacgaaccggtcaccgctgcacgtacactgctgaccgccgagaacgcgaccacagagattgaccgcgtgctgagccaactgctgaaagaacgtaaacctgtgtacatcaacctgccggttgatgtcgccgcggcgaaagccgagaaaccagctctgagcctggagaaatacagcccgacgttaaacaccacagaacaggtgatcctgtcgaagatcgaagaaagcctgaagaacgcccagaaaccggtcgtgatcgctgggcacgaggtgattagcttcggtctggagaagacggttacgcagtttgtgagtgaaaccaggctgccgattactaccctgaactttggcaaatcggctgtggatgaatccctgccgtccttcctgggtatctacaatggtaagctgagcgagattagcctcaagaactttgtggaaagcgcagacttcatcctgatgcttggtgtgaaactgacggatatcagtacgggcgcgtttacgcaccatctggacgagaacaagatgattagcctgaacattgatgaaggcatcatcttcaacaaagtcgtagaagacttcgatttccgtgcggttgttagcagcctgaacgagctgctaggcattgaatacgaaggtcaatacattgataagcagtacgaagagttcattccgagcgtcgcaccactgagccaagaccgtctgtggcaagcagtagaatctctgacacagtccaatgaaaccattgtggcggaacagggcacgtcgttcttcggtgcctccaccatccctctgaagagcaattcacgcttcatcggtcagccgctttggggcagcatcggctatacgtttccggcagcactgggatcacagattgcggatgacgaaagtcgccatctgctgttcattggtgatggtagcctgcaactgaccgtgcaggagctgggcctggcgatccgtgagaaactgaacccgatttgtttcatcatcaacaacgatggctataccgtagagcgcgagattcatgggcctacacagccgtacaatgacatcccgatgtggaactatagcaaactgccggaaacctttggcgcgacggaagatcgcgtagttagcaagatcgttcgcacagagaacgagtttgtgggggtcatgaaagaagcgcaggccgatgttaaccgcatgtattggattgaactggttctggagaaagaagatgcaccgaaactgctgaagaagatggggaagctgtttgcagaacagaacaaa

SEQ ID NO: 268 - protein, 547 aa, Artificial Sequence
  Variant of branched-chain keto acid decarboxylase (kdcA) from Lactococcus lactis
MYTVGDYLLDRLHELGIEEIFGVPGDYNLQFLDQIIAREDMKWIGNANELNASYMADGYARTKKAAAFLTTFGVGELSAINGLAGSYAENLPVVEIVGSPTSKVQNRGKFVHHTLADGDFKHFMKMHEPVTAARTLLTAENATTEIDRVLSQLLKERKPVYINLPVDVAAAKAEKPALSLEKYSPTLNTTEQVILSKIEESLKNAQKPVVIAGHEVISFGLEKTVTQFVSETRLPITTLNFGKSAVDESLPSFLGIYNGKLSEISLKNFVESADFILMLGVKLTDISTGAFTHHLDENKMISLNIDEGIIFNKVVEDFDFRAVVSSLNELLGIEYEGQYIDKQYEEFIPSVAPLSQDRLWQAVESLTQSNETIVAEQGTSFFGASTIPLKSNSRFIGQPLWGSIGYTFPAALGSQIADDESRHLLFIGDGSLQLTVQELGLAIREKLNPICFIINNDGYTVEREIHGPTQPYNDIPMWNYSKLPETFGATEDRVVSKIVRTENEFVGVMKEAQADVNRMYWIELVLEKEDAPKLLKKMGKLFAEQNK

SEQ ID NO: 269 - DNA, 1641 bp, Artificial Sequence
  Variant of branched-chain keto acid decarboxylase (kdcA) from Lactococcus lactis
atgtacaccgttggcgactatctgctggaccgtctgcatgaactgggaattgaagaaatctttggcgtgccgggcgattacaatctgcaattcctggatcaaatcattgcgcgcgaagatatgaaatggattggtaacgcgaatgaactgaatgcgagctacatggctgatggctatgcacgtacgaagaaggcggcggcgttcctgacgaccttcggtgttggtgaactgagcgcaatcaatgggttggcgggcagctatgcagagaacctgccagtcgtggaaatcgttgggagtccgacctcgaaggtgcagaaccgaggcaagttcgttcatcacaccctggccgacggcgacttcaagcacttcatgaagatgcacgaaccggtcaccgctgcacgtacactgctgaccgccgagaacgcgaccacagagattgaccgcgtgctgagccaactgctgaaagaacgtaaacctgtgtacatcaacctgccggttgatgtcgccgcggcgaaagccgagaaaccagctctgagcctggagaaatacagcccgacgttaaacaccacagaacaggtgatcctgtcgaagatcgaagaaagcctgaagaacgcccagaaaccggtcgtgatcgctgggcacgaggtgattagcttcggtctggagaagacggttacgcagtttgtgagtgaaaccaggctgccgattactaccctgaactttggcaaatcggctgtggatgaatccctgccgtccttcctgggtatctacaatggtaagctgagcgagattagcctcaagaactttgtggaaagcgcagacttcatcctgatgcttggtgtgaaactgacggatatcagtacgggcgcgtttacgcaccatctggacgagaacaagatgattagcctgaacattgatgaaggcatcatcttcaacaaagctgtagaagacttcgatttccgtgcggttgttagcagcctgaacgagctgctaggcattgaatacgaaggtcaatacattgataagcagtacgaagagttcattccgagcgtcgcaccactgagccaagaccgtctgtggcaagcagtagaatctctgacacagtccaatgaaaccattgtggcggaacagggcacgtcgttcttcggtgcctccaccatccctctgaagagcaattcacgcttcatcggtcagccgctttggggcagcatcggctatacgtttccggcagcactgggatcacagattgcggatgacgaaagtcgccatctgctgttcattggtgatggtagcctgcaactgaccgtgcaggagctgggcctggcgatccgtgagaaactgaacccgatttgtttcatcatcaacaacgatggctataccgtagagcgcgagattcatgggcctacacagccgtacaatgacatcccgatgtggaactatagcaaactgccggaaacctttggcgcgacggaagatcgcgtagttagcaagatcgttcgcacagagaacgagtttgtgagtgtcatgaaagaagcgcaggccgatgttaaccgcatgtattggattgaactggttctggagaaagaagatgcaccgaaactgctgaagaagatggggaagctgtttgcagaacagaacaaa

SEQ ID NO: 270 - protein, 547 aa, Artificial Sequence
  Variant of branched-chain keto acid decarboxylase (kdcA) from Lactococcus lactis
MYTVGDYLLDRLHELGIEEIFGVPGDYNLQFLDQIIAREDMKWIGNANELNASYMADGYARTKKAAAFLTTFGVGELSAINGLAGSYAENLPVVEIVGSPTSKVQNRGKFVHHTLADGDFKHFMKMHEPVTAARTLLTAENATTEIDRVLSQLLKERKPVYINLPVDVAAAKAEKPALSLEKYSPTLNTTEQVILSKIEESLKNAQKPVVIAGHEVISFGLEKTVTQFVSETRLPITTLNFGKSAVDESLPSFLGIYNGKLSEISLKNFVESADFILMLGVKLTDISTGAFTHHLDENKMISLNIDEGIIFNKAVEDFDFRAVVSSLNELLGIEYEGQYIDKQYEEFIPSVAPLSQDRLWQAVESLTQSNETIVAEQGTSFFGASTIPLKSNSRFIGQPLWGSIGYTFPAALGSQIADDESRHLLFIGDGSLQLTVQELGLAIREKLNPICFIINNDGYTVEREIHGPTQPYNDIPMWNYSKLPETFGATEDRVVSKIVRTENEFVSVMKEAQADVNRMYWIELVLEKEDAPKLLKKMGKLFAEQNK

SEQ ID NO: 271 - DNA, 1641 bp, Artificial Sequence
  Variant of branched-chain keto acid decarboxylase (kdcA) from Lactococcus lactis
atgtacaccgttggcgactatctgctggaccgtctgcatgaactgggaattgaagaaatctttggcgtgccgggcgattacaatctgcaattcctggatcaaatcattgcgcgcgaagatatgaaatggattggtaacgcgaatgaactgaatgcgagctacatggctgatggctatgcacgtacgaagaaggcggcggcgttcctgacgaccttcggtgttggtgaactgagcgcaatcaatgggttggcgggcagctatgcagagaacctgccagtcgtggaaatcgttgggagtccgacctcgaaggtgcagaaccgaggcaagttcgttcatcacaccctggccgacggcgacttcaagcacttcatgaagatgcacgaaccggtcaccgctgcacgtacactgctgaccgccgagaacgcgaccacagagattgaccgcgtgctgagccaactgctgaaagaacgtaaacctgtgtacatcaacctgccggttgatgtcgccgcggcgaaagccgagaaaccagctctgagcctggagaaatacagcccgacgttaaacaccacagaacaggtgatcctgtcgaagatcgaagaaagcctgaagaacgcccagaaaccggtcgtgatcgctgggcacgaggtgattagcttcggtctggagaagacggttacgcagtttgtgagtgaaaccaggctgccgattactaccctgaactttggcaaatcggctgtggatgaatccctgccgtccttcctgggtatctacaatggtaagctgagcgagattagcctcaagaactttgtggaaagcgcagacttcatcctgatgcttggtgtgaaactgacggatatcagtacgggcgcgtttacgcaccatctggacgagaacaagatgattagcctgaacattgatgaaggcatcatcttcaacaaagtcgtagaagacttcgatttccgtgcggttgttagcagcctgaacgagctgctaggcattgaatacgaaggtcaatacattgataagcagtacgaagagttcattccgagcgtcgcaccactgagccaagaccgtctgtggcaagcagtagaatctctgacacagtccaatgaaaccattgtggcggaacagggcacgtcgttcttcggtgcctccaccatccctctgaagagcggttcacgcttcatcggtcagccgctttggggcagcatcggctatacgtttccggcagcactgggatcacagattgcggatgacgaaagtcgccatctgctgttcattggtgatggtagcctgcaactgaccgtgcaggagctgggcctggcgatccgtgagaaactgaacccgatttgtttcatcatcaacaacgatggctataccgtagagcgcgagattcatgggcctacacagccgtacaatgacatcccgatgtggaactatagcaaactgccggaaacctttggcgcgacggaagatcgcgtagttagcaagatcgttcgcacagagaacgagtttgtgagtgtcatgaaagaagcgcaggccgatgttaaccgcatgtattggattgaactggttctggagaaagaagatgcaccgaaactgctgaagaagatggggaagctgtttgcagaacagaacaaa

SEQ ID NO: 272 - protein, 547 aa, Artificial Sequence; identical to SEQ ID NO: 260
  Variant of branched-chain keto acid decarboxylase (kdcA) from Lactococcus lactis

SEQ ID NO: 273 - DNA, 1641 bp, Artificial Sequence
  Variant of branched-chain keto acid decarboxylase (kdcA) from Lactococcus lactis
atgtacaccgttggcgactatctgctggaccgtctgcatgaactgggaattgaagaaatctttggcgtgccgggcgattacaatctgcaattcctggatcaaatcattgcgcgcgaagatatgaaatggattggtaacgcgaatgaactgaatgcgagctacatggctgatggctatgcacgtacgaagaaggcggcggcgttcctgacgaccttcggtgttggtgaactgagcgcaatcaatgggttggcgggcagctatgcagagaacctgccagtcgtggaaatcgttgggagtccgacctcgaaggtgcagaaccgaggcaagttcgttcatcacaccctggccgacggcgacttcaagcacttcatgaagatgcacgaaccggtcaccgctgcacgtacactgctgaccgccgagaacgcgaccacagagattgaccgcgtgctgagccaactgctgaaagaacgtaaacctgtgtacatcaacctgccggttgatgtcgccgcggcgaaagccgagaaaccagctctgagcctggagaaatacagcccgacgttaaacaccacagaacaggtgatcctgtcgaagatcgaagaaagcctgaagaacgcccagaaaccggtcgtgatcgctgggcacgaggtgattagcttcggtctggagaagacggttacgcagtttgtgagtgaaaccaggctgccgattactaccctgaactttggcaaatcggctgtggatgaatccctgccgtccttcctgggtatctacaatggtaagctgagcgagattagcctcaagaactttgtggaaagcgcagacttcatcctgatgcttggtgtgaaactgacggatatcagtacgggcgcgtttacgcaccatctggacgagaacaagatgattagcctgaacattgatgaaggcatcatcttcaacaaagtcgtagaagacttcgatttccgtgcggttgttagcagcctgaacgagctgctaggcattgaatacgaaggtcaatacattgataagcagtacgaagagttcattccgagcgtcgcaccactgagccaagaccgtctgtggcaagcagtagaatctctgacacagtccaatgaaaccattgtggcggaacagggcacgtcgttcttcggtgcctccaccatccctctgaagagctcttcacgcttcatcggtcagccgctttggggcagcatcggctatacgtttccggcagcactgggatcacagattgcggatgacgaaagtcgccatctgctgttcattggtgatggtagcctgcaactgaccgtgcaggagctgggcctggcgatccgtgagaaactgaacccgatttgtttcatcatcaacaacgatggctataccgtagagcgcgagattcatgggcctacacagccgtacaatgacatcccgatgtggaactatagcaaactgccggaaacctttggcgcgacggaagatcgcgtagttagcaagatcgttcgcacagagaacgagtttgtgagtgtcatgaaagaagcgcaggccgatgttaaccgcatgtattggattgaactggttctggagaaagaagatgcaccgaaactgctgaagaagatggggaagctgtttgcagaacagaacaaa

SEQ ID NO: 274 - protein, 547 aa, Artificial Sequence
  Variant of branched-chain keto acid decarboxylase (kdcA) from Lactococcus lactis
MYTVGDYLLDRLHELGIEEIFGVPGDYNLQFLDQIIAREDMKWIGNANELNASYMADGYARTKKAAAFLTTFGVGELSAINGLAGSYAENLPVVEIVGSPTSKVQNRGKFVHHTLADGDFKHFMKMHEPVTAARTLLTAENATTEIDRVLSQLLKERKPVYINLPVDVAAAKAEKPALSLEKYSPTLNTTEQVILSKIEESLKNAQKPVVIAGHEVISFGLEKTVTQFVSETRLPITTLNFGKSAVDESLPSFLGIYNGKLSEISLKNFVESADFILMLGVKLTDISTGAFTHHLDENKMISLNIDEGIIFNKVVEDFDFRAVVSSLNELLGIEYEGQYIDKQYEEFIPSVAPLSQDRLWQAVESLTQSNETIVAEQGTSFFGASTIPLKSSSRFIGQPLWGSIGYTFPAALGSQIADDESRHLLFIGDGSLQLTVQELGLAIREKLNPICFIINNDGYTVEREIHGPTQPYNDIPMWNYSKLPETFGATEDRVVSKIVRTENEFVSVMKEAQADVNRMYWIELVLEKEDAPKLLKKMGKLFAEQNK

SEQ ID NO: 275 - DNA, 1641 bp, Artificial Sequence
  Variant of branched-chain keto acid decarboxylase (kdcA) from Lactococcus lactis
atgtacaccgttggcgactatctgctggaccgtctgcatgaactgggaattgaagaaatctttggcgtgccgggcgattacaatctgcaattcctggatcaaatcattgcgcgcgaagatatgaaatggattggtaacgcgaatgaactgaatgcgagctacatggctgatggctatgcacgtacgaagaaggcggcggcgttcctgacgaccttcggtgttggtgaactgagcgcaatcaatgggttggcgggcagctatgcagagaacctgccagtcgtggaaatcgttgggagtccgacctcgaaggtgcagaaccgaggcaagttcgttcatcacaccctggccgacggcgacttcaagcacttcatgaagatgcacgaaccggtcaccgctgcacgtacactgctgaccgccgagaacgcgaccacagagattgaccgcgtgctgagccaactgctgaaagaacgtaaacctgtgtacatcaacctgccggttgatgtcgccgcggcgaaagccgagaaaccagctctgagcctggagaaatacagcccgacgttaaacaccacagaacaggtgatcctgtcgaagatcgaagaaagcctgaagaacgcccagaaaccggtcgtgatcgctgggcacgaggtgattagcttcggtctggagaagacggttacgcagtttgtgagtgaaaccaggctgccgattactaccctgaactttggcaaatcggctgtggatgaatccctgccgtccttcctgggtatctacaatggtaagctgagcgagattagcctcaagaactttgtggaaagcgcagacttcatcctgatgcttggtgtgaaactgacggatatcagtacgggcgcgtttacgcaccatctggacgagaacaagatgattagcctgaacattgatgaaggcatcatcttcaacaaagtcgtagaagacttcgatttccgtgcggttgttagcagcctgaacgagctgctaggcattgaatacgaaggtcaatacattgataagcagtacgaagagttcattccgagcgtcgcaccactgagccaagaccgtctgtggcaagcagtagaatctctgacacagatgaatgaaaccattgtggcggaacagggcacgtcgttcttcggtgcctccaccatccctctgaagagcaattcacgcttcatcggtcagccgctttggggcagcatcggctatacgtttccggcagcactgggatcacagattgcggatgacgaaagtcgccatctgctgttcattggtgatggtagcctgcaactgaccgtgcaggagctgggcctggcgatccgtgagaaactgaacccgatttgtttcatcatcaacaacgatggctataccgtagagcgcgagattcatgggcctacacagccgtacaatgacatcccgatgtggaactatagcaaactgccggaaacctttggcgcgacggaagatcgcgtagttagcaagatcgttcgcacagagaacgagtttgtgagtgtcatgaaagaagcgcaggccgatgttaaccgcatgtattggattgaactggttctggagaaagaagatgcaccgaaactgctgaagaagatggggaagctgtttgcagaacagaacaaa

SEQ ID NO: 276 - protein, 547 aa, Artificial Sequence
  Variant of branched-chain keto acid decarboxylase (kdcA) from Lactococcus lactis
MYTVGDYLLDRLHELGIEEIFGVPGDYNLQFLDQIIAREDMKWIGNANELNASYMADGYARTKKAAAFLTTFGVGELSAINGLAGSYAENLPVVEIVGSPTSKVQNRGKFVHHTLADGDFKHFMKMHEPVTAARTLLTAENATTEIDRVLSQLLKERKPVYINLPVDVAAAKAEKPALSLEKYSPTLNTTEQVILSKIEESLKNAQKPVVIAGHEVISFGLEKTVTQFVSETRLPITTLNFGKSAVDESLPSFLGIYNGKLSEISLKNFVESADFILMLGVKLTDISTGAFTHHLDENKMISLNIDEGIIFNKVVEDFDFRAVVSSLNELLGIEYEGQYIDKQYEEFIPSVAPLSQDRLWQAVESLTQMNETIVAEQGTSFFGASTIPLKSNSRFIGQPLWGSIGYTFPAALGSQIADDESRHLLFIGDGSLQLTVQELGLAIREKLNPICFIINNDGYTVEREIHGPTQPYNDIPMWNYSKLPETFGATEDRVVSKIVRTENEFVSVMKEAQADVNRMYWIELVLEKEDAPKLLKKMGKLFAEQNK

SEQ ID NO: 277 - DNA, 1641 bp, Artificial Sequence; identical to SEQ ID NO: 255
  Variant of branched-chain keto acid decarboxylase (kdcA) from Lactococcus lactis

SEQ ID NO: 278 - protein, 547 aa, Artificial Sequence; identical to SEQ ID NO: 256
  Variant of branched-chain keto acid decarboxylase (kdcA) from Lactococcus lactis

SEQ ID NO: 279 - DNA, 1641 bp, Artificial Sequence
  Variant of branched-chain keto acid decarboxylase (kdcA) from Lactococcus lactis
atgtacaccgttggcgactatctgctggaccgtctgcatgaactgggaattgaagaaatctttggcgtgccgggcgattacaatctgcaattcctggatcaaatcattgcgcgcgaagatatgaaatggattggtaacgcgaatgaactgaatgcgagctacatggctgatggctatgcacgtacgaagaaggcggcggcgttcctgacgaccttcggtgttggtgaactgagcgcaatcaatgggttggcgggcagctatgcagagaacctgccagtcgtggaaatcgttgggagtccgacctcgaaggtgcagaaccgaggcaagttcgttcatcacaccctggccgacggcgacttcaagcacttcatgaagatgcacgaaccggtcaccgctgcacgtacactgctgaccgccgagaacgcgaccacagagattgaccgcgtgctgagccaactgctgaaagaacgtaaacctgtgtacatcaacctgccggttgatgtcgccgcggcgaaagccgagaaaccagctctgagcctggagaaatacagcccgacgttaaacaccacagaacaggtgatcctgtcgaagatcgaagaaagcctgaagaacgcccagaaaccggtcgtgatcgctgggcacgaggtgattagcttcggtctggagaagacggttacgcagtttgtgagtgaaaccaggctgccgattactaccctgaactttggcaaatcggctgtggatgaatccctgccgtccttcctgggtatctacaatggtaagctgagcgagattagcctcaagaactttgtggaaagcgcagacttcatcctgatgcttggtgtgaaactgacggatatcagtacgggcgcgtttacgcaccatctggacgagaacaagatgattagcctgaacattgatgaaggcatcatcttcaacaaagtcgtagaagacttcgatttccgtgcggttgttagcagcctgaacgagctgctaggcattgaatacgaaggtcaatacattgataagcagtacgaagagttcattccgagcgtcgcaccactgagccaagaccgtctgtggcaagcagtagaatctctgacacagacgaatgaaaccattgtggcggaacagggcacgtcgttcttcggtgcctccaccatccctctgaagagcaattcacgcttcatcggtcagccgctttggggcagcatcggctatacgtttccggcagcactgggatcacagattgcggatgacgaaagtcgccatctgctgttcattggtgatggtagcctgcaactgaccgtgcaggagctgggcctggcgatccgtgagaaactgaacccgatttgtttcatcatcaacaacgatggctataccgtagagcgcgagattcatgggcctacacagccgtacaatgacatcccgatgtggaactatagcaaactgccggaaacctttggcgcgacggaagatcgcgtagttagcaagatcgttcgcacagagaacgagtttgtgagtgtcatgaaagaagcgcaggccgatgttaaccgcatgtattggattgaactggttctggagaaagaagatgcaccgaaactgctgaagaagatggggaagctgtttgcagaacagaacaaa

SEQ ID NO: 280 - protein, 547 aa, Artificial Sequence
  Variant of branched-chain keto acid decarboxylase (kdcA) from Lactococcus lactis
MYTVGDYLLDRLHELGIEEIFGVPGDYNLQFLDQIIAREDMKWIGNANELNASYMADGYARTKKAAAFLTTFGVGELSAINGLAGSYAENLPVVEIVGSPTSKVQNRGKFVHHTLADGDFKHFMKMHEPVTAARTLLTAENATTEIDRVLSQLLKERKPVYINLPVDVAAAKAEKPALSLEKYSPTLNTTEQVILSKIEESLKNAQKPVVIAGHEVISFGLEKTVTQFVSETRLPITTLNFGKSAVDESLPSFLGIYNGKLSEISLKNFVESADFILMLGVKLTDISTGAFTHHLDENKMISLNIDEGIIFNKVVEDFDFRAVVSSLNELLGIEYEGQYIDKQYEEFIPSVAPLSQDRLWQAVESLTQTNETIVAEQGTSFFGASTIPLKSNSRFIGQPLWGSIGYTFPAALGSQIADDESRHLLFIGDGSLQLTVQELGLAIREKLNPICFIINNDGYTVEREIHGPTQPYNDIPMWNYSKLPETFGATEDRVVSKIVRTENEFVSVMKEAQADVNRMYWIELVLEKEDAPKLLKKMGKLFAEQNK

SEQ ID NO: 281 - DNA, 1641 bp, Artificial Sequence
  Variant of branched-chain keto acid decarboxylase (kdcA) from Lactococcus lactis
atgtacaccgttggcgactatctgctggaccgtctgcatgaactgggaattgaagaaatctttggcgtgccgggcgattacaatctgcaattcctggatcaaatcattgcgcgcgaagatatgaaatggattggtaacgcgaatgaactgaatgcgagctacatggctgatggctatgcacgtacgaagaaggcggcggcgttcctgacgaccttcggtgttggtgaactgagcgcaatcaatgggttggcgggcagctatgcagagaacctgccagtcgtggaaatcgttgggagtccgacctcgaaggtgcagaaccgaggcaagttcgttcatcacaccctggccgacggcgacttcaagcacttcatgaagatgcacgaaccggtcaccgctgcacgtacactgctgaccgccgagaacgcgaccacagagattgaccgcgtgctgagccaactgctgaaagaacgtaaacctgtgtacatcaacctgccggttgatgtcgccgcggcgaaagccgagaaaccagctctgagcctggagaaatacagcccgacgttaaacaccacagaacaggtgatcctgtcgaagatcgaagaaagcctgaagaacgcccagaaaccggtcgtgatcgctgggcacgaggtgattagcttcggtctggagaagacggttacgcagtttgtgagtgaaaccaggctgccgattactaccctgaactttggcaaatcggctgtggatgaatccctgccgtccttcctgggtatctacaatggtaagctgagcgagattagcctcaagaactttgtggaaagcgcagacttcatcctgatgcttggtgtgaaactgacggatatcagtacgggcgcgtttacgcaccatctggacgagaacaagatgattagcctgaacattgatgaaggcatcatcttcaacaaagtcgtagaagacttcgatttccgtgcggttgttagcagcctgaacgagctgctaggcattgaatacgaaggtcaatacattgataagcagtacgaagagttcattccgagcgtcgcaccactgagccaagaccgtctgtggcaagcagtagaatctctgacacagtccaatgaaaccattgtggcggaacagggcacgtcgttcttcggtgcctccaccatccctctgaagagcaattcacgcttcatcggtcagccgctttggggcagcatcggctatacgtttccggcagcactgggatcacagattgcggatgacgaaagtcgccatctgctgttcattggtgatggtagcctgcaactgaccgtgcaggagctgggcctggcgatccgtgagaaactgaacccgatttgtttcatcatcaacaacgatggctataccgtagagcgcgagattcatgggcctacacagccgtacaatgacatcccgatgtggaactatagcaaactgccggaaacctttggcgcgacggaagatcgcgtagttagcaagatcgttcgcacagagaacgagtttgtgagtgtcatgaaacttgcgcaggccgatgttaaccgcatgtattggattgaactggttctggagaaagaagatgcaccgaaactgctgaagaagatggggaagctgtttgcagaacagaacaaa

SEQ ID NO: 282 - protein, 547 aa, Artificial Sequence
  Variant of branched-chain keto acid decarboxylase (kdcA) from Lactococcus lactis
MYTVGDYLLDRLHELGIEEIFGVPGDYNLQFLDQIIAREDMKWIGNANELNASYMADGYARTKKAAAFLTTFGVGELSAINGLAGSYAENLPVVEIVGSPTSKVQNRGKFVHHTLADGDFKHFMKMHEPVTAARTLLTAENATTEIDRVLSQLLKERKPVYINLPVDVAAAKAEKPALSLEKYSPTLNTTEQVILSKIEESLKNAQKPVVIAGHEVISFGLEKTVTQFVSETRLPITTLNFGKSAVDESLPSFLGIYNGKLSEISLKNFVESADFILMLGVKLTDISTGAFTHHLDENKMISLNIDEGIIFNKVVEDFDFRAVVSSLNELLGIEYEGQYIDKQYEEFIPSVAPLSQDRLWQAVESLTQSNETIVAEQGTSFFGASTIPLKSNSRFIGQPLWGSIGYTFPAALGSQIADDESRHLLFIGDGSLQLTVQELGLAIREKLNPICFIINNDGYTVEREIHGPTQPYNDIPMWNYSKLPETFGATEDRVVSKIVRTENEFVSVMKLAQADVNRMYWIELVLEKEDAPKLLKKMGKLFAEQNK

SEQ ID NO: 283 - DNA, 1641 bp, Artificial Sequence
  Variant of branched-chain keto acid decarboxylase (kdcA) from Lactococcus lactis
atgtacaccgttggcgactatctgctggaccgtctgcatgaactgggaattgaagaaatctttggcgtgccgggcgattacaatctgcaattcctggatcaaatcattgcgcgcgaagatatgaaatggattggtaacgcgaatgaactgaatgcgagctacatggctgatggctatgcacgtacgaagaaggcggcggcgttcctgacgaccttcggtgttggtgaactgagcgcaatcaatgggttggcgggcagctatgcagagaacctgccagtcgtggaaatcgttgggagtccgacctcgaaggtgcagaaccgaggcaagttcgttcatcacaccctggccgacggcgacttcaagcacttcatgaagatgcacgaaccggtcaccgctgcacgtacactgctgaccgccgagaacgcgaccacagagattgaccgcgtgctgagccaactgctgaaagaacgtaaacctgtgtacatcaacctgccggttgatgtcgccgcggcgaaagccgagaaaccagctctgagcctggagaaatacagcccgacgttaaacaccacagaacaggtgatcctgtcgaagatcgaagaaagcctgaagaacgcccagaaaccggtcgtgatcgctgggcacgaggtgattagcttcggtctggagaagacggttacgcagtttgtgagtgaaaccaggctgccgattactaccctgaactttggcaaatcggctgtggatgaatccctgccgtccttcctgggtatctacaatggtaagctgagcgagattagcctcaagaactttgtggaaagcgcagacttcatcctgatgcttggtgtgaaactgacggatatcagtacgggcgcgtttacgcaccatctggacgagaacaagatgattagcctgaacattgatgaaggcatcatcttcaacaaagtcgtagaagacttcgatttccgtgcggttgttagcagcctgaacgagctgctaggcattgaatacgaaggtcaatacattgataagcagtacgaagagttcattccgagcgtcgcaccactgagccaagaccgtctgtggcaagcagtagaatctctgacacagcgtaatgaaaccattgtggcggaacagggcacgtcgttcttcggtgcctccaccatccctctgaagagcaattcacgcttcatcggtcagccgctttggggcagcatcggctatacgtttccggcagcactgggatcacagattgcggatgacgaaagtcgccatctgctgttcattggtgatggtagcctgcaactgaccgtgcaggagctgggcctggcgatccgtgagaaactgaacccgatttgtttcatcatcaacaacgatggctataccgtagagcgcgagattcatgggcctacacagccgtacaatgacatcccgatgtggaactatagcaaactgccggaaacctttggcgcgacggaagatcgcgtagttagcaagatcgttcgcacagagaacgagtttgtgagtgtcatgaaagaagcgcaggccgatgttaaccgcatgtattggattgaactggttctggagaaagaagatgcaccgaaactgctgaagaagatggggaagctgtttgcagaacagaacaaa

SEQ ID NO: 284 - protein, 547 aa, Artificial Sequence
  Variant of branched-chain keto acid decarboxylase (kdcA) from Lactococcus lactis
MYTVGDYLLDRLHELGIEEIFGVPGDYNLQFLDQIIAREDMKWIGNANELNASYMADGYARTKKAAAFLTTFGVGELSAINGLAGSYAENLPVVEIVGSPTSKVQNRGKFVHHTLADGDFKHFMKMHEPVTAARTLLTAENATTEIDRVLSQLLKERKPVYINLPVDVAAAKAEKPALSLEKYSPTLNTTEQVILSKIEESLKNAQKPVVIAGHEVISFGLEKTVTQFVSETRLPITTLNFGKSAVDESLPSFLGIYNGKLSEISLKNFVESADFILMLGVKLTDISTGAFTHHLDENKMISLNIDEGIIFNKVVEDFDFRAVVSSLNELLGIEYEGQYIDKQYEEFIPSVAPLSQDRLWQAVESLTQRNETIVAEQGTSFFGASTIPLKSNSRFIGQPLWGSIGYTFPAALGSQIADDESRHLLFIGDGSLQLTVQELGLAIREKLNPICFIINNDGYTVEREIHGPTQPYNDIPMWNYSKLPETFGATEDRVVSKIVRTENEFVSVMKEAQADVNRMYWIELVLEKEDAPKLLKKMGKLFAEQNK

SEQ ID NO: 285 - DNA, 1641 bp, Artificial Sequence
  Variant of branched-chain keto acid decarboxylase (kdcA) from Lactococcus lactis
atgtacaccgttggcgactatctgctggaccgtctgcatgaactgggaattgaagaaatctttggcgtgccgggcgattacaatctgcaattcctggatcaaatcattgcgcgcgaagatatgaaatggattggtaacgcgaatgaactgaatgcgagctacatggctgatggctatgcacgtacgaagaaggcggcggcgttcctgacgaccttcggtgttggtgaactgagcgcaatcaatgggttggcgggcagctatgcagagaacctgccagtcgtggaaatcgttgggagtccgacctcgaaggtgcagaaccgaggcaagttcgttcatcacaccctggccgacggcgacttcaagcacttcatgaagatgcacgaaccggtcaccgctgcacgtacactgctgaccgccgagaacgcgaccacagagattgaccgcgtgctgagccaactgctgaaagaacgtaaacctgtgtacatcaacctgccggttgatgtcgccgcggcgaaagccgagaaaccagctctgagcctggagaaatacagcccgacgttaaacaccacagaacaggtgatcctgtcgaagatcgaagaaagcctgaagaacgcccagaaaccggtcgtgatcgctgggcacgaggtgattagcttcggtctggagaagacggttacgcagtttgtgagtgaaaccaggctgccgattactaccctgaactttggcaaatcggctgtggatgaatccctgccgtccttcctgggtatctacaatggtaagctgagcgagattagcctcaagaactttgtggaaagcgcagacttcatcctgatgcttggtgtgaaactgacggatatcagtacgggcgcgtttacgcaccatctggacgagaacaagatgattagcctgaacattgatgaaggcatcatcttcaacaaagtcgtagaagacttcgatttccgtgcggttgttagcagcctgaacgagctgctaggcattgaatacgaaggtcaatacattgataagcagtacgaacgtttcattccgagcgtcgcaccactgagccaagaccgtctgtggcaagcagtagaatctctgacacagtccaatgaaaccattgtggcggaacagggcacgtcgttcttcggtgcctccaccatccctctgaagagcaattcacgcttcatcggtcagccgctttggggcagcatcggctatacgtttccggcagcactgggatcacagattgcggatgacgaaagtcgccatctgctgttcattggtgatggtagcctgcaactgaccgtgcaggagctgggcctggcgatccgtgagaaactgaacccgatttgtttcatcatcaacaacgatggctataccgtagagcgcgagattcatgggcctacacagccgtacaatgacatcccgatgtggaactatagcaaactgccggaaacctttggcgcgacggaagatcgcgtagttagcaagatcgttcgcacagagaacgagtttgtgagtgtcatgaaagaagcgcaggccgatgttaaccgcatgtattggattgaactggttctggagaaagaagatgcaccgaaactgctgaagaagatggggaagctgtttgcagaacagaacaaa

SEQ ID NO: 286 - protein, 547 aa, Artificial Sequence
  Variant of branched-chain keto acid decarboxylase (kdcA) from Lactococcus lactis
MYTVGDYLLDRLHELGIEEIFGVPGDYNLQFLDQIIAREDMKWIGNANELNASYMADGYARTKKAAAFLTTFGVGELSAINGLAGSYAENLPVVEIVGSPTSKVQNRGKFVHHTLADGDFKHFMKMHEPVTAARTLLTAENATTEIDRVLSQLLKERKPVYINLPVDVAAAKAEKPALSLEKYSPTLNTTEQVILSKIEESLKNAQKPVVIAGHEVISFGLEKTVTQFVSETRLPITTLNFGKSAVDESLPSFLGIYNGKLSEISLKNFVESADFILMLGVKLTDISTGAFTHHLDENKMISLNIDEGIIFNKVVEDFDFRAVVSSLNELLGIEYEGQYIDKQYERFIPSVAPLSQDRLWQAVESLTQSNETIVAEQGTSFFGASTIPLKSNSRFIGQPLWGSIGYTFPAALGSQIADDESRHLLFIGDGSLQLTVQELGLAIREKLNPICFIINNDGYTVEREIHGPTQPYNDIPMWNYSKLPETFGATEDRVVSKIVRTENEFVSVMKEAQADVNRMYWIELVLEKEDAPKLLKKMGKLFAEQNK

SEQ ID NO: 287 - DNA, 1641 bp, Artificial Sequence
  Variant of branched-chain keto acid decarboxylase (kdcA) from Lactococcus lactis
atgtacaccgttggcgactatctgctggaccgtctgcatgaactgggaattgaagaaatctttggcgtgccgggcgattacaatctgcaattcctggatcaaatcattgcgcgcgaagatatgaaatggattggtaacgcgaatgaactgaatgcgagctacatggctgatggctatgcacgtacgaagaaggcggcggcgttcctgacgaccttcggtgttggtgaactgagcgcaatcaatgggttggcgggcagctatgcagagaacctgccagtcgtggaaatcgttgggagtccgacctcgaaggtgcagaaccgaggcaagttcgttcatcacaccctggccgacggcgacttcaagcacttcatgaagatgcacgaaccggtcaccgctgcacgtacactgctgaccgccgagaacgcgaccacagagattgaccgcgtgctgagccaactgctgaaagaacgtaaacctgtgtacatcaacctgccggttgatgtcgccgcggcgaaagccgagaaaccagctctgagcctggagaaatacagcccgacgttaaacaccacagaacaggtgatcctgtcgaagatcgaagaaagcctgaagaacgcccagaaaccggtcgtgatcgctgggcacgaggtgattagcttcggtctggagaagacggttacgcagtttgtgagtgaaaccaggctgccgattactaccctgaactttggcaaatcggctgtggatgaatccctgccgtccttcctgggtatctacaatggtaagctgagcgagattagcctcaagaactttgtggaaagcgcagacttcatcctgatgcttggtgtgaaactgacggatatcagtacgggcgcgtttacgcaccatctggacgagaacaagatgattagcctgaacattgatgaaggcatcatcttcaacaaagtcgtagaagacttcgatttccgtgcggttgttagcagcctgaacgagctgctaggcattgaatacgaaggtcaatacattgataagcagtacgaagagttcattccgagcgtcgcaccactgagccaagaccgtctgtggcaagcagtagaatctctgacacagactaatgaaaccattgtggcggaacagggcacgtcgttcttcggtgcctccaccatccctctgaagagcaattcacgcttcatcggtcagccgctttggggcagcatcggctatacgtttccggcagcactgggatcacagattgcggatgacgaaagtcgccatctgctgttcattggtgatggtagcctgcaactgaccgtgcaggagctgggcctggcgatccgtgagaaactgaacccgatttgtttcatcatcaacaacgatggctataccgtagagcgcgagattcatgggcctacacagccgtacaatgacatcccgatgtggaactatagcaaactgccggaaacctttggcgcgacggaagatcgcgtagttagcaagatcgttcgcacagagaacgagtttgtgagtgtcatgaaagaagcgcaggccgatgttaaccgcatgtattggattgaactggttctggagaaagaagatgcaccgaaactgctgaagaagatggggaagctgtttgcagaacagaacaaa

SEQ ID NO: 288 - protein, 547 aa, Artificial Sequence; identical to SEQ ID NO: 280
  Variant of branched-chain keto acid decarboxylase (kdcA) from Lactococcus lactis

SEQ ID NO: 289 - DNA, 1641 bp, Artificial Sequence
  Variant of branched-chain keto acid decarboxylase (kdcA) from Lactococcus lactis
atgtacaccgttggcgactatctgctggaccgtctgcatgaactgggaattgaagaaatctttggcgtgccgggcgattacaatctgcaattcctggatcaaatcattgcgcgcgaagatatgaaatggattggtaacgcgaatgaactgaatgcgagctacatggctgatggctatgcacgtacgaagaaggcggcggcgttcctgacgaccttcggtgttggtgaactgagcgcaatcaatgggttggcgggcagctatgcagagaacctgccagtcgtggaaatcgttgggagtccgacctcgaaggtgcagaaccgaggcaagttcgttcatcacaccctggccgacggcgacttcaagcacttcatgaagatgcacgaaccggtcaccgctgcacgtacactgctgaccgccgagaacgcgaccacagagattgaccgcgtgctgagccaactgctgaaagaacgtaaacctgtgtacatcaacctgccggttgatgtcgccgcggcgaaagccgagaaaccagctctgagcctggagaaatacagcccgacgttaaacaccacagaacaggtgatcctgtcgaagatcgaagaaagcctgaagaacgcccagaaaccggtcgtgatcgctgggcacgaggtgattagcttcggtctggagaagacggttacgcagtttgtgagtgaaaccaggctgccgattactaccctgaactttggcaaatcggctgtggatgaatccctgccgtccttcctgggtatctacaatggtaagctgagcgagattagcctcaagaactttgtggaaagcgcagacttcatcctgatgcttggtgtgaaactgacggatatcagtacgggcgcgtttacgcaccatctggacgagaacaagatgattagcctgaacattgatgaaggcatcatcttcaacaaagtcgtagaagacttcgatttccgtgcggttgttagcagcctgaacgagctgctaggcattgaatacgaaggtcaatacattgataagcagtacgaagagttcattccgagcgtcgcaccactgagccaagaccgtctgtggcaagcagtagaatctctgacacagtccaatgaaaccattgtggcggaacagggcacgtcgttcttcggtgcctccaccatccctctgaagagcaattcacgcttcatcggtcagccgctttggggcagcatcggctatacgtttccggcagcactgggatcacagattgcggatgacgaaagtcgccatctgctgttcattggtgatggtagcctgcaactgaccgtgcaggagctgggcctggcgatccgtgagaaactgaacccgatttgtttcatcatcaacaacgatggctataccgtagagcgcgagattcatgggcctacacagccgtacaatgacatcccgatgtggaactatagcaaactgccggaaacctttggcgcgacggaagatcgcgtagttagcaagatcgttcgcacagagaacgagtttgtgagtgtcatgaaaaaggcgcaggccgatgttaaccgcatgtattggattgaactggttctggagaaagaagatgcaccgaaactgctgaagaagatggggaagctgtttgcagaacagaacaaa

SEQ ID NO: 290 - protein, 547 aa, Artificial Sequence
  Variant of branched-chain keto acid decarboxylase (kdcA) from Lactococcus lactis
MYTVGDYLLDRLHELGIEEIFGVPGDYNLQFLDQIIAREDMKWIGNANELNASYMADGYARTKKAAAFLTTFGVGELSAINGLAGSYAENLPVVEIVGSPTSKVQNRGKFVHHTLADGDFKHFMKMHEPVTAARTLLTAENATTEIDRVLSQLLKERKPVYINLPVDVAAAKAEKPALSLEKYSPTLNTTEQVILSKIEESLKNAQKPVVIAGHEVISFGLEKTVTQFVSETRLPITTLNFGKSAVDESLPSFLGIYNGKLSEISLKNFVESADFILMLGVKLTDISTGAFTHHLDENKMISLNIDEGIIFNKVVEDFDFRAVVSSLNELLGIEYEGQYIDKQYEEFIPSVAPLSQDRLWQAVESLTQSNETIVAEQGTSFFGASTIPLKSNSRFIGQPLWGSIGYTFPAALGSQIADDESRHLLFIGDGSLQLTVQELGLAIREKLNPICFIINNDGYTVEREIHGPTQPYNDIPMWNYSKLPETFGATEDRVVSKIVRTENEFVSVMKKAQADVNRMYWIELVLEKEDAPKLLKKMGKLFAEQNK

SEQ ID NO: 291 - DNA, 1641 bp, Artificial Sequence
  Variant of branched-chain keto acid decarboxylase (kdcA) from Lactococcus lactis
atgtacaccgttggcgactatctgctggaccgtctgcatgaactgggaattgaagaaatctttggcgtgccgggcgattacaatctgcaattcctggatcaaatcattgcgcgcgaagatatgaaatggattggtaacgcgaatgaactgaatgcgagctacatggctgatggctatgcacgtacgaagaaggcggcggcgttcctgacgaccttcggtgttggtgaactgagcgcaatcaatgggttggcgggcagctatgcagagaacctgccagtcgtggaaatcgttgggagtccgacctcgaaggtgcagaaccgaggcaagttcgttcatcacaccctggccgacggcgacttcaagcacttcatgaagatgcacgaaccggtcaccgctgcacgtacactgctgaccgccgagaacgcgaccacagagattgaccgcgtgctgagccaactgctgaaagaacgtaaacctgtgtacatcaacctgccggttgatgtcgccgcggcgaaagccgagaaaccagctctgagcctggagaaatacagcccgacgttaaacaccacagaacaggtgatcctgtcgaagatcgaagaaagcctgaagaacgcccagaaaccggtcgtgatcgctgggcacgaggtgattagcttcggtctggagaagacggttacgcagtttgtgagtgaaaccaggctgccgattactaccctgaactttggcaaatcggctgtggatgaatccctgccgtccttcctgggtatctacaatggtaagctgagcgagattagcctcaagaactttgtggaaagcgcagacttcatcctgatgcttggtgtgaaactgacggatatcagtacgggcgcgtttacgcaccatctggacgagaacaagatgattagcctgaacattgatgaaggcatcatcttcaacaaagtcgtagaagacttcgatttccgtgcggttgttagcagcctgaacgagctgctaggcattgaatacgaaggtcaatacattgataagcagtacgaagagttcattccgagcgtcgcaccactgagccaagaccgtctgtggcaagcagtagaatctctgacacagtccaatgaaaccattgtggcggaacagggcacgtcgttcttcggtgcctccaccatccctctgaagagcaggtcacgcttcatcggtcagccgctttggggcagcatcggctatacgtttccggcagcactgggatcacagattgcggatgacgaaagtcgccatctgctgttcattggtgatggtagcctgcaactgaccgtgcaggagctgggcctggcgatccgtgagaaactgaacccgatttgtttcatcatcaacaacgatggctataccgtagagcgcgagattcatgggcctacacagccgtacaatgacatcccgatgtggaactatagcaaactgccggaaacctttggcgcgacggaagatcgcgtagttagcaagatcgttcgcacagagaacgagtttgtgagtgtcatgaaagaagcgcaggccgatgttaaccgcatgtattggattgaactggttctggagaaagaagatgcaccgaaactgctgaagaagatggggaagctgtttgcagaacagaacaaa

SEQ ID NO: 292 - protein, 547 aa, Artificial Sequence
  Variant of branched-chain keto acid decarboxylase (kdcA) from Lactococcus lactis
MYTVGDYLLDRLHELGIEEIFGVPGDYNLQFLDQIIAREDMKWIGNANELNASYMADGYARTKKAAAFLTTFGVGELSAINGLAGSYAENLPVVEIVGSPTSKVQNRGKFVHHTLADGDFKHFMKMHEPVTAARTLLTAENATTEIDRVLSQLLKERKPVYINLPVDVAAAKAEKPALSLEKYSPTLNTTEQVILSKIEESLKNAQKPVVIAGHEVISFGLEKTVTQFVSETRLPITTLNFGKSAVDESLPSFLGIYNGKLSEISLKNFVESADFILMLGVKLTDISTGAFTHHLDENKMISLNIDEGIIFNKVVEDFDFRAVVSSLNELLGIEYEGQYIDKQYEEFIPSVAPLSQDRLWQAVESLTQSNETIVAEQGTSFFGASTIPLKSRSRFIGQPLWGSIGYTFPAALGSQIADDESRHLLFIGDGSLQLTVQELGLAIREKLNPICFIINNDGYTVEREIHGPTQPYNDIPMWNYSKLPETFGATEDRVVSKIVRTENEFVSVMKEAQADVNRMYWIELVLEKEDAPKLLKKMGKLFAEQNK

SEQ ID NO: 293 - DNA, 1641 bp, Artificial Sequence
  Variant of branched-chain keto acid decarboxylase (kdcA) from Lactococcus lactis
atgtacaccgttggcgactatctgctggaccgtctgcatgaactgggaattgaagaaatctttggcgtgccgggcgattacaatctgcaattcctggatcaaatcattgcgcgcgaagatatgaaatggattggtaacgcgaatgaactgaatgcgagctacatggctgatggctatgcacgtacgaagaaggcggcggcgttcctgacgaccttcggtgttggtgaactgagcgcaatcaatgggttggcgggcagctatgcagagaacctgccagtcgtggaaatcgttgggagtccgacctcgaaggtgcagaaccgaggcaagttcgttcatcacaccctggccgacggcgacttcaagcacttcatgaagatgcacgaaccggtcaccgctgcacgtacactgctgaccgccgagaacgcgaccacagagattgaccgcgtgctgagccaactgctgaaagaacgtaaacctgtgtacatcaacctgccggttgatgtcgccgcggcgaaagccgagaaaccagctctgagcctggagaaatacagcccgacgttaaacaccacagaacaggtgatcctgtcgaagatcgaagaaagcctgaagaacgcccagaaaccggtcgtgatcgctgggcacgaggtgattagcttcggtctggagaagacggttacgcagtttgtgagtgaaaccaggctgccgattactaccctgaactttggcaaatcggctgtggatgaatccctgccgtccttcctgggtatctacaatggtaagctgagcgagattagcctcaagaactttgtggaaagcgcagacttcatcctgatgcttggtgtgaaactgacggatatcagtacgggcgcgtttacgcaccatctggacgagaacaagatgattagcctgaacattgatgaaggcatcatcttcaacaaagtcgtagaagacttcgatttccgtgcggttgttagcagcctgaacgagctgctaggcattgattacgaaggtcaatacattgataagcagtacgaagagttcattccgagcgtcgcaccactgagccaagaccgtctgtggcaagcagtagaatctctgacacagtccaatgaaaccattgtggcggaacagggcacgtcgttcttcggtgcctccaccatccctctgaagagcaattcacgcttcatcggtcagccgctttggggcagcatcggctatacgtttccggcagcactgggatcacagattgcggatgacgaaagtcgccatctgctgttcattggtgatggtagcctgcaactgaccgtgcaggagctgggcctggcgatccgtgagaaactgaacccgatttgtttcatcatcaacaacgatggctataccgtagagcgcgagattcatgggcctacacagccgtacaatgacatcccgatgtggaactatagcaaactgccggaaacctttggcgcgacggaagatcgcgtagttagcaagatcgttcgcacagagaacgagtttgtgagtgtcatgaaagaagcgcaggccgatgttaaccgcatgtattggattgaactggttctggagaaagaagatgcaccgaaactgctgaagaagatggggaagctgtttgcagaacagaacaaa

SEQ ID NO: 294 - protein, 547 aa, Artificial Sequence
  Variant of branched-chain keto acid decarboxylase (kdcA) from Lactococcus lactis
MYTVGDYLLDRLHELGIEEIFGVPGDYNLQFLDQIIAREDMKWIGNANELNASYMADGYARTKKAAAFLTTFGVGELSAINGLAGSYAENLPVVEIVGSPTSKVQNRGKFVHHTLADGDFKHFMKMHEPVTAARTLLTAENATTEIDRVLSQLLKERKPVYINLPVDVAAAKAEKPALSLEKYSPTLNTTEQVILSKIEESLKNAQKPVVIAGHEVISFGLEKTVTQFVSETRLPITTLNFGKSAVDESLPSFLGIYNGKLSEISLKNFVESADFILMLGVKLTDISTGAFTHHLDENKMISLNIDEGIIFNKVVEDFDFRAVVSSLNELLGIDYEGQYIDKQYEEFIPSVAPLSQDRLWQAVESLTQSNETIVAEQGTSFFGASTIPLKSNSRFIGQPLWGSIGYTFPAALGSQIADDESRHLLFIGDGSLQLTVQELGLAIREKLNPICFIINNDGYTVEREIHGPTQPYNDIPMWNYSKLPETFGATEDRVVSKIVRTENEFVSVMKEAQADVNRMYWIELVLEKEDAPKLLKKMGKLFAEQNK

SEQ ID NO: 295 - DNA, 1641 bp, Artificial Sequence; identical to SEQ ID NO: 245
  Variant of branched-chain keto acid decarboxylase (kdcA) from Lactococcus lactis

SEQ ID NO: 296 - protein, 547 aa, Artificial Sequence; identical to SEQ ID NO: 246
  Variant of branched-chain keto acid decarboxylase (kdcA) from Lactococcus lactis

SEQ ID NO: 297 - DNA, 1641 bp, Artificial Sequence
  Variant of branched-chain keto acid decarboxylase (kdcA) from Lactococcus lactis
atgtacaccgttggcgactatctgctggaccgtctgcatgaactgggaattgaagaaatctttggcgtgccgggcgattacaatctgcaattcctggatcaaatcattgcgcgcgaagatatgaaatggattggtaacgcgaatgaactgaatgcgagctacatggctgatggctatgcacgtacgaagaaggcggcggcgttcctgacgaccttcggtgttggtgaactgagcgcaatcaatgggttggcgggcagctatgcagagaacctgccagtcgtggaaatcgttgggagtccgacctcgaaggtgcagaaccgaggcaagttcgttcatcacaccctggccgacggcgacttcaagcacttcatgaagatgcacgaaccggtcaccgctgcacgtacactgctgaccgccgagaacgcgaccacagagattgaccgcgtgctgagccaactgctgaaagaacgtaaacctgtgtacatcaacctgccggttgatgtcgccgcggcgaaagccgagaaaccagctctggtgctggagaaatacagcccgacgttaaacaccacagaacaggtgatcctgtcgaagatcgaagaaagcctgaagaacgcccagaaaccggtcgtgatcgctgggcacgaggtgattagcttcggtctggagaagacggttacgcagtttgtgagtgaaaccaggctgccgattactaccctgaactttggcaaatcggctgtggatgaatccctgccgtccttcctgggtatctacaatggtaagctgagcgagattagcctcaagaactttgtggaaagcgcagacttcatcctgatgcttggtgtgaaactgacggatatcagtacgggcgcgtttacgcaccatctggacgagaacaagatgattagcctgaacattgatgaaggcatcatcttcaacaaagtcgtagaagacttcgatttccgtgcggttgttagcagcctgaacgagctgctaggcattgaatacgaaggtcaatacattgataagcagtacgaagagttcattccgagcgtcgcaccactgagccaagaccgtctgtggcaagcagtagaatctctgacacagtccaatgaaaccattgtggcggaacagggcacgtcgttcttcggtgcctccaccatccctctgaagagcaattcacgcttcatcggtcagccgctttggggcagcatcggctatacgtttccggcagcactgggatcacagattgcggatgacgaaagtcgccatctgctgttcattggtgatggtagcctgcaactgaccgtgcaggagctgggcctggcgatccgtgagaaactgaacccgatttgtttcatcatcaacaacgatggctataccgtagagcgcgagattcatgggcctacacagccgtacaatgacatcccgatgtggaactatagcaaactgccggaaacctttggcgcgacggaagatcgcgtagttagcaagatcgttcgcacagagaacgagtttgtgagtgtcatgaaagaagcgcaggccgatgttaaccgcatgtattggattgaactggttctggagaaagaagatgcaccgaaactgctgaagaagatggggaagctgtttgcagaacagaacaaa

SEQ ID NO: 298 - protein, 547 aa, Artificial Sequence
  Variant of branched-chain keto acid decarboxylase (kdcA) from Lactococcus lactis
MYTVGDYLLDRLHELGIEEIFGVPGDYNLQFLDQIIAREDMKWIGNANELNASYMADGYARTKKAAAFLTTFGVGELSAINGLAGSYAENLPVVEIVGSPTSKVQNRGKFVHHTLADGDFKHFMKMHEPVTAARTLLTAENATTEIDRVLSQLLKERKPVYINLPVDVAAAKAEKPALVLEKYSPTLNTTEQVILSKIEESLKNAQKPVVIAGHEVISFGLEKTVTQFVSETRLPITTLNFGKSAVDESLPSFLGIYNGKLSEISLKNFVESADFILMLGVKLTDISTGAFTHHLDENKMISLNIDEGIIFNKVVEDFDFRAVVSSLNELLGIEYEGQYIDKQYEEFIPSVAPLSQDRLWQAVESLTQSNETIVAEQGTSFFGASTIPLKSNSRFIGQPLWGSIGYTFPAALGSQIADDESRHLLFIGDGSLQLTVQELGLAIREKLNPICFIINNDGYTVEREIHGPTQPYNDIPMWNYSKLPETFGATEDRVVSKIVRTENEFVSVMKEAQADVNRMYWIELVLEKEDAPKLLKKMGKLFAEQNK

SEQ ID NO: 299 - DNA, 1641 bp, Artificial Sequence
  Variant of branched-chain keto acid decarboxylase (kdcA) from Lactococcus lactis
atgtacaccgttggcgactatctgctggaccgtctgcatgaactgggaattgaagaaatctttggcgtgccgggcgattacaatctgcaattcctggatcaaatcattgcgcgcgaagatatgaaatggattggtaacgcgaatgaactgaatgcgagctacatggctgatggctatgcacgtacgaagaaggcggcggcgttcctgacgaccttcggtgttggtgaactgagcgcaatcaatgggttggcgggcagctatgcagagaacctgccagtcgtggaaatcgttgggagtccgacctcgaaggtgcagaaccgaggcaagttcgttcatcacaccctggccgacggcgacttcaagcacttcatgaagatgcacgaaccggtcaccgctgcacgtacactgctgaccgccgagaacgcgaccacagagattgaccgcgtgctgagccaactgctgaaagaacgtaaacctgtgtacatcaacctgccggttgatgtcgccgcggcgaaagccgagaaaccagctctgagcctggagaaatacagcccgacgttaaacaccacagaacaggtgatcctgtcgaagatcgaagaaagcctgaagaacgcccagaaaccggtcgtgatcgctgggcacgaggtgattagcttcggtctggagaagacggttacgcagtttgtgagtgaaaccaggctgccgattactaccctgaactttggcaaatcggctgtggatgaatccctgccgtccttcctgggtatctacaatggtaagctgagcgagattagcctcaagaactttgtggaaagcgcagacttcatcctgatgcttggtgtgaaactgacggatatcagtacgggcgcgtttacgcaccatctggacgagaacaagatgattagcctgaacattgatgaaggcatcatcttcaacaaagtcgtagaagacttcgatttccgtgcggttgttagcagcctgaacgagctgctaggcattcagtacgaaggtcaatacattgataagcagtacgaagagttcattccgagcgtcgcaccactgagccaagaccgtctgtggcaagcagtagaatctctgacacagtccaatgaaaccattgtggcggaacagggcacgtcgttcttcggtgcctccaccatccctctgaagagcaattcacgcttcatcggtcagccgctttggggcagcatcggctatacgtttccggcagcactgggatcacagattgcggatgacgaaagtcgccatctgctgttcattggtgatggtagcctgcaactgaccgtgcaggagctgggcctggcgatccgtgagaaactgaacccgatttgtttcatcatcaacaacgatggctataccgtagagcgcgagattcatgggcctacacagccgtacaatgacatcccgatgtggaactatagcaaactgccggaaacctttggcgcgacggaagatcgcgtagttagcaagatcgttcgcacagagaacgagtttgtgagtgtcatgaaagaagcgcaggccgatgttaaccgcatgtattggattgaactggttctggagaaagaagatgcaccgaaactgctgaagaagatggggaagctgtttgcagaacagaacaaa

SEQ ID NO: 300 - protein, 547 aa, Artificial Sequence
  Variant of branched-chain keto acid decarboxylase (kdcA) from Lactococcus lactis
MYTVGDYLLDRLHELGIEEIFGVPGDYNLQFLDQIIAREDMKWIGNANELNASYMADGYARTKKAAAFLTTFGVGELSAINGLAGSYAENLPVVEIVGSPTSKVQNRGKFVHHTLADGDFKHFMKMHEPVTAARTLLTAENATTEIDRVLSQLLKERKPVYINLPVDVAAAKAEKPALSLEKYSPTLNTTEQVILSKIEESLKNAQKPVVIAGHEVISFGLEKTVTQFVSETRLPITTLNFGKSAVDESLPSFLGIYNGKLSEISLKNFVESADFILMLGVKLTDISTGAFTHHLDENKMISLNIDEGIIFNKVVEDFDFRAVVSSLNELLGIQYEGQYIDKQYEEFIPSVAPLSQDRLWQAVESLTQSNETIVAEQGTSFFGASTIPLKSNSRFIGQPLWGSIGYTFPAALGSQIADDESRHLLFIGDGSLQLTVQELGLAIREKLNPICFIINNDGYTVEREIHGPTQPYNDIPMWNYSKLPETFGATEDRVVSKIVRTENEFVSVMKEAQADVNRMYWIELVLEKEDAPKLLKKMGKLFAEQNK

SEQ ID NO: 301 - DNA, 1641 bp, Artificial Sequence
  Variant of branched-chain keto acid decarboxylase (kdcA) from Lactococcus lactis
atgtacaccgttggcgactatctgctggaccgtctgcatgaactgggaattgaagaaatctttggcgtgccgggcgattacaatctgcaattcctggatcaaatcattgcgcgcgaagatatgaaatggattggtaacgcgaatgaactgaatgcgagctacatggctgatggctatgcacgtacgaagaaggcggcggcgttcctgacgaccttcggtgttggtgaactgagcgcaatcaatgggttggcgggcagctatgcagagaacctgccagtcgtggaaatcgttgggagtccgacctcgaaggtgcagaaccgaggcaagttcgttcatcacaccctggccgacggcgacttcaagcacttcatgaagatgcacgaaccggtcaccgctgcacgtacactgctgaccgccgagaacgcgaccacagagattgaccgcgtgctgagccaactgctgaaagaacgtaaacctgtgtacatcaacctgccggttgatgtcgccgcggcgaaagccgagaaaccagctctgagcctggagaaatacagcccgacgttaaacaccacagaacaggtgatcctgtcgaagatcgaagaaagcctgaagaacgcccagaaaccggtcgtgatcgctgggcacgaggtgattagcttcggtctggagaagacggttacgcagtttgtgagtgaaaccaggctgccgattactaccctgaactttggcaaatcggctgtggatgaatccctgccgtccttcctgggtatctacaatggtaagctgagcgagattagcctcaagaactttgtggaaagcgcagacttcatcctgatgcttggtgtgaaactgacggatatcagtacgggcgcgtttacgcaccatctggacgagaacaagatgattagcctgaacattgatgaaggcatcatcttcaacaaagtcgtagaagacttcgatttccgtgcggttgttagcagcctgaacgagctgctaggcattgaatacgaaggtcaatacattgataagcagtacgaagagttcattccgagcgtcgcaccactgagccaagaccgtctgtggcaagcagtagaatctctgacacagtccaatgaaaccattgtggcggaacagggcacgtcgttcttcggtgcctccaccatccctctgaagagcaattcacgcttcatcggtcagccgctttggggcagcatcggctatacgtttccggcagcactgggatcacagattgcggatgacgaaagtcgccatctgctgttcattggtgatggtagcctgcaactgaccgtgcaggagctgggcctggcgatccgtgagaaactgaacccgatttgtttcatcatcaacaacgatggctataccgtagagcgcgagattcatgggcctacacagccgtacaatgacatcccgatgtggaactatagcaaactgccggaaacctttggcgcgacggaagatcgcgtagttagcaagatcgtacgcacagagaacgagtttgtgaaggtcatgaaagaagcgcaggccgatgttaaccgcatgtattggattgaactggttctggagaaagaagatgcaccgaaactgctgaagaagatggggaagctgtttgcagaacagaacaaa

SEQ ID NO: 302 - protein, 547 aa, Artificial Sequence
  Variant of branched-chain keto acid decarboxylase (kdcA) from Lactococcus lactis
MYTVGDYLLDRLHELGIEEIFGVPGDYNLQFLDQIIAREDMKWIGNANELNASYMADGYARTKKAAAFLTTFGVGELSAINGLAGSYAENLPVVEIVGSPTSKVQNRGKFVHHTLADGDFKHFMKMHEPVTAARTLLTAENATTEIDRVLSQLLKERKPVYINLPVDVAAAKAEKPALSLEKYSPTLNTTEQVILSKIEESLKNAQKPVVIAGHEVISFGLEKTVTQFVSETRLPITTLNFGKSAVDESLPSFLGIYNGKLSEISLKNFVESADFILMLGVKLTDISTGAFTHHLDENKMISLNIDEGIIFNKVVEDFDFRAVVSSLNELLGIEYEGQYIDKQYEEFIPSVAPLSQDRLWQAVESLTQSNETIVAEQGTSFFGASTIPLKSNSRFIGQPLWGSIGYTFPAALGSQIADDESRHLLFIGDGSLQLTVQELGLAIREKLNPICFIINNDGYTVEREIHGPTQPYNDIPMWNYSKLPETFGATEDRVVSKIVRTENEFVKVMKEAQADVNRMYWIELVLEKEDAPKLLKKMGKLFAEQNK

SEQ ID NO: 303 - DNA, 1641 bp, Artificial Sequence
  Variant of branched-chain keto acid decarboxylase (kdcA) from Lactococcus lactis
atgtacaccgttggcgactatctgctggaccgtctgcatgaactgggaattgaagaaatctttggcgtgccgggcgattacaatctgcaattcctggatcaaatcattgcgcgcgaagatatgaaatggattggtaacgcgaatgaactgaatgcgagctacatggctgatggctatgcacgtacgaagaaggcggcggcgttcctgacgaccttcggtgttggtgaactgagcgcaatcaatgggttggcgggcagctatgcagagaacctgccagtcgtggaaatcgttgggagtccgacctcgaaggtgcagaaccgaggcaagttcgttcatcacaccctggccgacggcgacttcaagcacttcatgaagatgcacgaaccggtcaccgctgcacgtacactgctgaccgccgagaacgcgaccacagagattgaccgcgtgctgagccaactgctgaaagaacgtaaacctgtgtacatcaacctgccggttgatgtcgccgcggcgaaagccgagaaaccagctctgagcctggagaaatacagcccgacgttaaacaccacagaacaggtgatcctgtcgaagatcgaagaaagcctgaagaacgcccagaaaccggtcgtgatcgctgggcacgaggtgattagcttcggtctggagaagacggttacgcagtttgtgagtgaaaccaggctgccgattactaccctgaactttggcaaatcggctgtggatgaatccctgccgtccttcctgggtatctacaatggtaagctgagcgagattagcctcaagaactttgtggaaagcgcagacttcatcctgatgcttggtgtgaaactgacggatatcagtacgggcgcgtttacgcaccatctggacgagaacaagatgattagcctgaacattgatgaaggcatcatcttcaacaaagtcgtagaagacttcgatttccgtgcggttgttagcagcctgaacgagctgctaggcattgaatacgaaggtcaatacattgataagcagtacgaagagttcattccgagcgtcgcaccactgagccaagaccgtctgtggcaagcagtagaatctctgacacagtccaatgaaaccattgtggcggaacagggcacgtcgttcttcggtgcctccaccatccctctgaagagcaattcacgcttcatcggtcagccgctttggggcagcatcggctatacgtttccggcagcactgggatcacagattgcggatgacgaaagtcgccatctgctgttcattggtgatggtagcctgcaactgaccgtgcaggagctgggcctggcgatccgtgagaaactgaacccgatttgtttcatcatcaacaacgatggctataccgtagagcgcgagattcatgggcctacacagccgtacaatgacatcccgatgtggaactatagcaaactgccggaaacctttggcgcgacggaagatcgcgtagttagcaagatcgttcgcacagagaacgagtttgtgagtgtcatgaaagtggcgcaggccgatgttaaccgcatgtattggattgaactggttctggagaaagaagatgcaccgaaactgctgaagaagatggggaagctgtttgcagaacagaacaaa

SEQ ID NO: 304 - protein, 547 aa, Artificial Sequence
  Variant of branched-chain keto acid decarboxylase (kdcA) from Lactococcus lactis
MYTVGDYLLDRLHELGIEEIFGVPGDYNLQFLDQIIAREDMKWIGNANELNASYMADGYARTKKAAAFLTTFGVGELSAINGLAGSYAENLPVVEIVGSPTSKVQNRGKFVHHTLADGDFKHFMKMHEPVTAARTLLTAENATTEIDRVLSQLLKERKPVYINLPVDVAAAKAEKPALSLEKYSPTLNTTEQVILSKIEESLKNAQKPVVIAGHEVISFGLEKTVTQFVSETRLPITTLNFGKSAVDESLPSFLGIYNGKLSEISLKNFVESADFILMLGVKLTDISTGAFTHHLDENKMISLNIDEGIIFNKVVEDFDFRAVVSSLNELLGIEYEGQYIDKQYEEFIPSVAPLSQDRLWQAVESLTQSNETIVAEQGTSFFGASTIPLKSNSRFIGQPLWGSIGYTFPAALGSQIADDESRHLLFIGDGSLQLTVQELGLAIREKLNPICFIINNDGYTVEREIHGPTQPYNDIPMWNYSKLPETFGATEDRVVSKIVRTENEFVSVMKVAQADVNRMYWIELVLEKEDAPKLLKKMGKLFAEQNK

SEQ ID NO: 305 - DNA, 1641 bp, Artificial Sequence
  Variant of branched-chain keto acid decarboxylase (kdcA) from Lactococcus lactis
atgtacaccgttggcgactatctgctggaccgtctgcatgaactgggaattgaagaaatctttggcgtgccgggcgattacaatctgcaattcctggatcaaatcattgcgcgcgaagatatgaaatggattggtaacgcgaatgaactgaatgcgagctacatggctgatggctatgcacgtacgaagaaggcggcggcgttcctgacgaccttcggtgttggtgaactgagcgcaatcaatgggttggcgggcagctatgcagagaacctgccagtcgtggaaatcgttgggagtccgacctcgaaggtgcagaaccgaggcaagttcgttcatcacaccctggccgacggcgacttcaagcacttcatgaagatgcacgaaccggtcaccgctgcacgtacactgctgaccgccgagaacgcgaccacagagattgaccgcgtgctgagccaactgctgaaagaacgtaaacctgtgtacatcaacctgccggttgatgtcgccgcggcgaaagccgagaaaccagctctgagcctggagaaatacagcccgacgttaaacaccacagaacaggtgatcctgtcgaagatcgaagaaagcctgaagaacgcccagaaaccggtcgtgatcgctgggcacgaggtgattagcttcggtctggagaagacggttacgcagtttgtgagtgaaaccaggctgccgattactaccctgaactttggcaaatcggctgtggatgaatccctgccgtccttcctgggtatctacaatggtaagctgagcgagattagcctcaagaactttgtggaaagcgcagacttcatcctgatgcttggtgtgaaactgacggatatcagtacgggcgcgtttacgcaccatctggacgagaacaagatgattagcctgaacattgatgaaggcatcatcttcaacaaagtcgtagaagacttcgatttccgtgcggttgttagcagcctgaacgagctgctaggcattggttacgaaggtcaatacattgataagcagtacgaagagttcattccgagcgtcgcaccactgagccaagaccgtctgtggcaagcagtagaatctctgacacagtccaatgaaaccattgtggcggaacagggcacgtcgttcttcggtgcctccaccatccctctgaagagcaattcacgcttcatcggtcagccgctttggggcagcatcggctatacgtttccggcagcactgggatcacagattgcggatgacgaaagtcgccatctgctgttcattggtgatggtagcctgcaactgaccgtgcaggagctgggcctggcgatccgtgagaaactgaacccgatttgtttcatcatcaacaacgatggctataccgtagagcgcgagattcatgggcctacacagccgtacaatgacatcccgatgtggaactatagcaaactgccggaaacctttggcgcgacggaagatcgcgtagttagcaagatcgttcgcacagagaacgagtttgtgagtgtcatgaaagaagcgcaggccgatgttaaccgcatgtattggattgaactggttctggagaaagaagatgcaccgaaactgctgaagaagatggggaagctgtttgcagaacagaacaaa

SEQ ID NO: 306 - protein, 547 aa, Artificial Sequence
  Variant of branched-chain keto acid decarboxylase (kdcA) from Lactococcus lactis
MYTVGDYLLDRLHELGIEEIFGVPGDYNLQFLDQIIAREDMKWIGNANELNASYMADGYARTKKAAAFLTTFGVGELSAINGLAGSYAENLPVVEIVGSPTSKVQNRGKFVHHTLADGDFKHFMKMHEPVTAARTLLTAENATTEIDRVLSQLLKERKPVYINLPVDVAAAKAEKPALSLEKYSPTLNTTEQVILSKIEESLKNAQKPVVIAGHEVISFGLEKTVTQFVSETRLPITTLNFGKSAVDESLPSFLGIYNGKLSEISLKNFVESADFILMLGVKLTDISTGAFTHHLDENKMISLNIDEGIIFNKVVEDFDFRAVVSSLNELLGIGYEGQYIDKQYEEFIPSVAPLSQDRLWQAVESLTQSNETIVAEQGTSFFGASTIPLKSNSRFIGQPLWGSIGYTFPAALGSQIADDESRHLLFIGDGSLQLTVQELGLAIREKLNPICFIINNDGYTVEREIHGPTQPYNDIPMWNYSKLPETFGATEDRVVSKIVRTENEFVSVMKEAQADVNRMYWIELVLEKEDAPKLLKKMGKLFAEQNK

SEQ ID NO: 307 - DNA, 1641 bp, Artificial Sequence
  Variant of branched-chain keto acid decarboxylase (kdcA) from Lactococcus lactis
atgtacaccgttggcgactatctgctggaccgtctgcacgaactgggaattgaagaaatctttggcgtgccgggcgattacaatctgcaattcctggatcaaatcattgcgcgcgaagatatgaaatggattggtaacgcgaatgaactgaatgcgagctacatggctgatggctatgcacgtacgaagaaggcggcggcgttcctgacgaccttcggtgttggtgaactgagcgcaatcaatgggttggcgggcagctatgcagagaacctgccagtcgtggaaatcgttgggagtccgacctcgaaggtgcagaaccgaggcaagttcgttcatcacaccctggccgacggcgacttcaagcacttcatgaagatgcacgaaccggtcaccgctgcacgtacactgctgaccgccgagaacgcgaccacagagattgaccgcgtgctgagccaactgctgaaagaacgtaaacctgtgtacatcaacctgccggttgatgtcgccgcggcgaaagccgagaaaccagctctgagcctggagaaatacagcccgacgttaaacgaaacagaacaggtaatcctgtcgaagatcgaagaaagcctgcaaaacgcccagaaaccggtcgtgatcgctgggcacgaggtgattagcttcggtctggagaagacggttacgcagtttgtgagtgaaaccaggctgccgattactaccctgaactttggcaaatcggctgtggatgaatccctgccgtccttcctgggtatctacaatggtaagctgagcgagattagcctcaagaactttgtggaaagcgcagacttcatcctgatgcttggtgtgaaactgacggatatcagtacgggcgcgtttacgcaccatctggacgagaacaagatgattagcctgaacattgatgaaggcatcattttcaacaaagtcgtagaagacttcgatttccgtgcggttgttagcagcctgaacgagctgctaggcattgaatacgaaggtcaatacattgataagcagtacgaagagttcattccgagcgtcgcaccactgagccaagaccgtctgtggcaagcagtagaatctctgacacagtccaatgaaaccattgtggcggaacagggcacgtcgttcttcggtgcctccaccatccctctgaagagcaattcacgcttcatcggtcagccgctttggggcagcatcggctatacgtttccggcagcactgggatcacagattgcggacgacgaaagtcgccatctgctgttcattggtgatggtagcctgcaactgaccgtgcaggagctgggcctggcgatccgtgagaaactgaacccgatttgtttcatcatcaacaacgatggctataccgtagagcgcgagattcatgggcctacacagccgtacaatgacatcccgatgtggaactatagcaaactgccggaaacctttggcgcgacggaagatcgcgtagttagcaagatagttcgcacagagaacgagtttgtgagtgtcatgaaagaagcgcaggccgatgttaaccgcatgtattggattgaactggttctggaaaaagaagatgcaccgaaactgctgaagaagatggggaagctgtttgcagaacagaacaaa

SEQ ID NO: 308 - protein, 547 aa, Artificial Sequence
  Variant of branched-chain keto acid decarboxylase (kdcA) from Lactococcus lactis
MYTVGDYLLDRLHELGIEEIFGVPGDYNLQFLDQIIAREDMKWIGNANELNASYMADGYARTKKAAAFLTTFGVGELSAINGLAGSYAENLPVVEIVGSPTSKVQNRGKFVHHTLADGDFKHFMKMHEPVTAARTLLTAENATTEIDRVLSQLLKERKPVYINLPVDVAAAKAEKPALSLEKYSPTLNETEQVILSKIEESLQNAQKPVVIAGHEVISFGLEKTVTQFVSETRLPITTLNFGKSAVDESLPSFLGIYNGKLSEISLKNFVESADFILMLGVKLTDISTGAFTHHLDENKMISLNIDEGIIFNKVVEDFDFRAVVSSLNELLGIEYEGQYIDKQYEEFIPSVAPLSQDRLWQAVESLTQSNETIVAEQGTSFFGASTIPLKSNSRFIGQPLWGSIGYTFPAALGSQIADDESRHLLFIGDGSLQLTVQELGLAIREKLNPICFIINNDGYTVEREIHGPTQPYNDIPMWNYSKLPETFGATEDRVVSKIVRTENEFVSVMKEAQADVNRMYWIELVLEKEDAPKLLKKMGKLFAEQNK

SEQ ID NO: 309 - DNA, 1641 bp, Artificial Sequence
  Variant of branched-chain keto acid decarboxylase (kdcA) from Lactococcus lactis
atgtacaccgttggcgactatctgctggaccgtctgcacgaactgggaattgaagaaatctttggcgtgccgggcgattacaatctgcaattcctggatcaaatcattgcgcgcgaagatatgaaatggattggtaacgcgaatgaactgaatgcgagctacatggctgatggctatgcacgtacgaagaaggcggcggcgttcctgacgaccttcggtgttggtgaactgagcgcaatcaatgggttggcgggcagctatgcagagaacctgccagtcgtggaaatcgttgggagtccgacctcgaaggtgcagaaccgaggcaagttcgttcatcacaccctggccgacggcgacttcaagcacttcatgaagatgcacgaaccggtcaccgctgcacgtacactgctgaccgccgagaacgcgaccacagagattgaccgcgtgctgagccaactgctgaaagaacgtaaacctgtgtacatcaacctgccggttgatgtcgccgcggcgaaagccgagaaaccagctctgagcctggagaaatacagcccgacgttaaacacaacagaacaggtaatcctgtcgaagatcgaagaaagcctgcaaaacgcccagaaaccggtcgtgatcgctgggcacgaggtgattagcttcggtctggagaagacggttacgcagtttgtgagtgaaaccaggctgccgattactaccctgaactttggcaaatcggctgtggatgaatccctgccgtccttcctgggtatctacaatggtaagctgagcgagattagcctcaagaactttgtggaaagcgcagacttcatcctgatgcttggtgtgaaactgacggatatcagtacgggcgcgtttacgcaccatctggacgagaacaagatgattagcctgaacattgatgaaggcatcatcttcaacaaagtcgtagaagacttcgatttccgtgcggttgttagcagcctgaacgagctgctaggcattgaatacgaaggtcaatacattgataagcagtacgaagagttcattccgagcgtcgcaccactgagccaagaccgtctgtggcaagcagtagaatctctgacacagtccaatgaaaccattgtggcggaacagggcacgtcgttcttcggtgcctccaccatccctctgaagagcaattcacgcttcatcggtcagccgctttggggcagcatcggctatacgtttccggcagcactgggatcacagattgcggacgacgaaagtcgccatctgctgttcattggtgatggtagcctgcaactgaccgtgcaggagctgggcctggcgatccgtgagaaactgaacccgatttgtttcatcatcaacaacgatggctataccgtagagcgcgagattcatgggcctacacagccgtacaatgacatcccgatgtggaactatagcaaactgccggaaacctttggcgcgacggaagatcgcgtagttagcaagatcgttcgcacagagaacgagtttgtgagtgtcatgaaagaagcgcaggccgatgttaaccgcatgtattggattgaactggttctggaaaaagaagatgcaccgaaactgctgaagaagatggggaagctgtttgcagaacagaacaaa

SEQ ID NO: 310 - protein, 547 aa, Artificial Sequence
  Variant of branched-chain keto acid decarboxylase (kdcA) from Lactococcus lactis
MYTVGDYLLDRLHELGIEEIFGVPGDYNLQFLDQIIAREDMKWIGNANELNASYMADGYARTKKAAAFLTTFGVGELSAINGLAGSYAENLPVVEIVGSPTSKVQNRGKFVHHTLADGDFKHFMKMHEPVTAARTLLTAENATTEIDRVLSQLLKERKPVYINLPVDVAAAKAEKPALSLEKYSPTLNTTEQVILSKIEESLQNAQKPVVIAGHEVISFGLEKTVTQFVSETRLPITTLNFGKSAVDESLPSFLGIYNGKLSEISLKNFVESADFILMLGVKLTDISTGAFTHHLDENKMISLNIDEGIIFNKVVEDFDFRAVVSSLNELLGIEYEGQYIDKQYEEFIPSVAPLSQDRLWQAVESLTQSNETIVAEQGTSFFGASTIPLKSNSRFIGQPLWGSIGYTFPAALGSQIADDESRHLLFIGDGSLQLTVQELGLAIREKLNPICFIINNDGYTVEREIHGPTQPYNDIPMWNYSKLPETFGATEDRVVSKIVRTENEFVSVMKEAQADVNRMYWIELVLEKEDAPKLLKKMGKLFAEQNK

SEQ ID NO: 311 - DNA, 1641 bp, Artificial Sequence
  Variant of branched-chain keto acid decarboxylase (kdcA) from Lactococcus lactis
atgtacaccgttggcgactatctgctggaccgtctgcacgaactgggaattgaagaaatctttggcgtgccgggcgattacaatctgcaattcctggatcaaatcattgcgcgcgaagatatgaaatggattggtaacgcgaatgaactgaatgcgagctacatggctgatggctatgcacgtacgaagaaggcggcggcgttcctgacgaccttcggtgttggtgaactgagcgcaatcaatgggttggcgggcagctatgcagagaacctgccagtcgtggaaatcgttgggagtccgacctcgaaggtgcagaaccgaggcaagttcgttcatcacaccctggccgacggcgacttcaagcacttcatgaagatgcacgaaccggtcaccgctgcacgtacactgctgaccgccgagaacgcgaccacagagattgaccgcgtgctgagccaactgctgaaagaacgtaaacctgtgtacatcaacctgccggttgatgtcgccgcggcgaaagccgagaaaccagctctgagcctggagaaatacagcccgacgttaaacgaaacagaacaggcaatcctgtcgaagatcgaagaaagcctgaagaacgcccagaaaccggtcgtgatcgctgggcacgaggtgattagcttcggtctggagaagacggttacgcagtttgtgagtgaaaccaggctgccgattactaccctgaactttggcaaatcggctgtggatgaatccctgccgtccttcctgggtatctacaatggtaagctgagcgagattagcctcaagaactttgtggaaagcgcagacttcatcctgatgcttggtgtgaaactgacggatatcagtacgggcgcgtttacgcaccatctggacgagaacaagatgattagcctgaacattgatgaaggcatcatcttcaacaaagtcgtagaagacttcgatttccgtgcggttgttagcagcctgaacgagctgctaggcattgaatacgaaggtcaatacattgatagacagtacgaagagttcattccgagcgtcgcaccactgagccaagaccgtctgtggcaagcagtagaatctctgacacagtccaatgaaaccattgtggcggaacagggcacgtcgttcttcggtgcctccaccatccctctgaagagcaattcacgcttcatcggtcagccgctttggggcagcatcggctatacgtttccggcagcactgggatcacagattgcggatgacgaaagtcgccatctgctgttcattggtgatggtagcctgcaactgaccgtgcaggagctgggcctggcgatccgtgagaaactgaacccgatttgtttcatcatcaacaacgatggctataccgtagagcgcgagattcatgggcctacacagccgtacaatgacatcccgatgtggaactatagcaaactgccggaaacctttggcgcgacggaagatcgcgtagttagcaagatcgttcgcacagagaacgagtttgtgagtgtcatgaaagaagcgcaggccgatgttaaccgcatgtattggattgaactggttctggataaagaagatgcaccgaaactgctgaagaagatggggaagctgtttgcagaacagaacaaa

SEQ ID NO: 312 - protein, 547 aa, Artificial Sequence
  Variant of branched-chain keto acid decarboxylase (kdcA) from Lactococcus lactis
MYTVGDYLLDRLHELGIEEIFGVPGDYNLQFLDQIIAREDMKWIGNANELNASYMADGYARTKKAAAFLTTFGVGELSAINGLAGSYAENLPVVEIVGSPTSKVQNRGKFVHHTLADGDFKHFMKMHEPVTAARTLLTAENATTEIDRVLSQLLKERKPVYINLPVDVAAAKAEKPALSLEKYSPTLNETEQAILSKIEESLKNAQKPVVIAGHEVISFGLEKTVTQFVSETRLPITTLNFGKSAVDESLPSFLGIYNGKLSEISLKNFVESADFILMLGVKLTDISTGAFTHHLDENKMISLNIDEGIIFNKVVEDFDFRAVVSSLNELLGIEYEGQYIDRQYEEFIPSVAPLSQDRLWQAVESLTQSNETIVAEQGTSFFGASTIPLKSNSRFIGQPLWGSIGYTFPAALGSQIADDESRHLLFIGDGSLQLTVQELGLAIREKLNPICFIINNDGYTVEREIHGPTQPYNDIPMWNYSKLPETFGATEDRVVSKIVRTENEFVSVMKEAQADVNRMYWIELVLDKEDAPKLLKKMGKLFAEQNK

SEQ ID NO: 313 - DNA, 1641 bp, Artificial Sequence
  Variant of branched-chain keto acid decarboxylase (kdcA) from Lactococcus lactis
atgtacaccgttggcgactatctgctggaccgtctgcacgaactgggaattgaagaaatctttggcgtgccgggcgattacaatctgcaattcctggatcaaatcattgcgcgcgaagatatgaaatggattggtaacgcgaatgaactgaatgcgagctacatggctgatggctatgcacgtacgaagaaggcggcggcgttcctgacgaccttcggtgttggtgaactgagcgcaatcaatgggttggcgggcagctatgcagagaacctgccagtcgtggaaatcgttgggagtccgacctcgaaggtgcagaaccgaggcaagttcgttcatcacaccctggccgacggcgacttcaagcacttcatgaagatgcacgaaccggtcaccgctgcacgtacactgctgaccgccgagaacgcgaccacagagattgaccgcgtgctgagccaactgctgaaagaacgtaaacctgtgtacatcaacctgccggttgatgtcgccgcggcgaaagccgagaaaccagctctgagcctggagaaatacagcccgacgttaaacaccacagaacaggtgatcctgtcgaagatcgaagaaagcctgaagaacgcccagaaaccggtcgtgatcgctgggcacgaggtgattagcttcggtctggagaagacggttacgcagtttgtgagtgaaaccaggctgccgattactaccctgaactttggcaaatcggctgtggatgaatccctgccgtccttcctgggtatctacaatggtaaactgagcgagattagcctcaagaactttgtggaaagcgcagacttcatcctgatgcttggtgtgaaactgacggatatcagtacgggcgcgtttacgcatcattttgacgagaacaagatgattagcctgaacattgatgaaggcatcatcttcaacaaagtcgtagaagacttcgatttccgtgcggttgttagcagcctgaacgagctgctaggcattgaatacgaaggtcaatacattgataagcagtacgaagagttcattccgagcgtcgcaccactgagccaagaccgtctgtggcaagcagtagaatctctgacacagtccaatgaaaccattgtggcggaacagggcacgtcgttcttcggtgcctccaccatccctctgaagagcaattcacgcttcatcggtcagccgctttggggcagcatcggctatacgtttccggcagcactgggatcacagattgcggatgacgaaagtcgccatctgctgttcattggtgatggtagcctgcaactgaccgtgcaggagctgggcctggcgatccgtgagaaactgaacccgatttgtttcatcatcaacaacgatggctataccgtagagcgcgagattcatgggcctacacagccgtacaatgacatcccgatgtggaactatagcaaactgccggaaacctttggcgcgacggaagatcgcgtagttagcaagatcgttcgcacagagaacgagtttgtgagtgtcatgaaagaagcgcaggccgatgttaaccgcatgtattggattgaactggttctggagaaagaagatgcaccgaaactgctgaagaagatggggaagctgtttgcagaacagaacaaa

SEQ ID NO: 314 - protein, 547 aa, Artificial Sequence
  Variant of branched-chain keto acid decarboxylase (kdcA) from Lactococcus lactis
MYTVGDYLLDRLHELGIEEIFGVPGDYNLQFLDQIIAREDMKWIGNANELNASYMADGYARTKKAAAFLTTFGVGELSAINGLAGSYAENLPVVEIVGSPTSKVQNRGKFVHHTLADGDFKHFMKMHEPVTAARTLLTAENATTEIDRVLSQLLKERKPVYINLPVDVAAAKAEKPALSLEKYSPTLNTTEQVILSKIEESLKNAQKPVVIAGHEVISFGLEKTVTQFVSETRLPITTLNFGKSAVDESLPSFLGIYNGKLSEISLKNFVESADFILMLGVKLTDISTGAFTHHFDENKMISLNIDEGIIFNKVVEDFDFRAVVSSLNELLGIEYEGQYIDKQYEEFIPSVAPLSQDRLWQAVESLTQSNETIVAEQGTSFFGASTIPLKSNSRFIGQPLWGSIGYTFPAALGSQIADDESRHLLFIGDGSLQLTVQELGLAIREKLNPICFIINNDGYTVEREIHGPTQPYNDIPMWNYSKLPETFGATEDRVVSKIVRTENEFVSVMKEAQADVNRMYWIELVLEKEDAPKLLKKMGKLFAEQNK

SEQ ID NO: 315 - DNA, 1641 bp, Artificial Sequence
  Variant of branched-chain keto acid decarboxylase (kdcA) from Lactococcus lactis
atgtacaccgttggcgactatctgctggaccgtctgaaggaactgggaattgatgaaatctttggcgtgccgggcgattacaatctgcaattcctggatcaaatcattgcgcgcgaagatatgaaatggattggtaacgcgaatgaactgaatgcgagctacatggctgatggctatgcacgtacgaagaaggcggcggcgttcctgacgaccttcggtgttggtgaactgagcgcaatcaatgggttggcgggcagctatgcagagaacctgccagtcgtggaaatcgttgggagtccgacctcgaaggtgcagaaccgaggcaagttcgttcatcacaccctggccgacggcgacttcaagcacttcatgaagatgcacgaaccggtcaccgctgcacgtacactgctgaccgccgagaacgcgaccacagagattgaccgcgtgctgagccaactgctgaaagaacgtaaacctgtgtacatcaacctgccggttgatgtcgccgcggcgaaagccgagaaaccagctctgagcctggagaaatacagcccgacgttaaacaccacagaacaggtgatcctgtcgaagatcgaagaaagcctgaaaaacgcccagaaaccggtcgtgatcgctgggcacgaggtgattagcttcggtctggagaagacggttacgcagtttgtgagtgaaaccaggctgccgattactaccctgaactttggcaaatcggctgtggatgaatccctgccgtccttcctgggtatctacaatggtaagctgagcgagattagcctcaagaactttgtggaaagcgcagacttcatcctgatgcttggtgtgaaactgacggatatcagtacgggcgcgtttacgcaccatctggacgagaacaagatgattagcctgaacattgatgaaggcatcatcttcaacaaagtcgtagaagacttcgatttccgtgcggttgttagcagcctgaacgagctgctaggcattgaatacgaaggtcaatacattgataagcagtacgaagagttcattccgagcgtcgcaccactgagccaagaccgtctgtggcaagcagtagaatctctgacacagtccaatgaaaccattgtggcggaacagggcacgtcgttcttcggtgcctccaccatccctctgaagagcaattcacgcttcatcggtcagccgctttggggcagcatcggctatacgtttccggcagcactgggatcacagattgcggatgacgaaagtcgccatctgctgttcattggtgatggtagcctgcaactgaccgtgcaggagctgggcctggcgatccgtgagaaactgaacccgatttgtttcatcatcaacaacgatggctataccgtagagcgcgagattcatgggcctacacagccgtacaatgacatcccgatgtggaactatagcaaactgccggaaacctttggcgcgacggaagatcgcgtagttagcaagatcgttcgcacagagaacgagtttgtgagtgtcatgaaagaagcgcaggccgatgttaaccgcatgtattggattgaactggttctggaaaaagaagatgcaccgaaactgctgaagaagatggggaagctgtttgcagaacagaacaaa

SEQ ID NO: 316 - protein, 547 aa, Artificial Sequence
  Variant of branched-chain keto acid decarboxylase (kdcA) from Lactococcus lactis
MYTVGDYLLDRLKELGIDEIFGVPGDYNLQFLDQIIAREDMKWIGNANELNASYMADGYARTKKAAAFLTTFGVGELSAINGLAGSYAENLPVVEIVGSPTSKVQNRGKFVHHTLADGDFKHFMKMHEPVTAARTLLTAENATTEIDRVLSQLLKERKPVYINLPVDVAAAKAEKPALSLEKYSPTLNTTEQVILSKIEESLKNAQKPVVIAGHEVISFGLEKTVTQFVSETRLPITTLNFGKSAVDESLPSFLGIYNGKLSEISLKNFVESADFILMLGVKLTDISTGAFTHHLDENKMISLNIDEGIIFNKVVEDFDFRAVVSSLNELLGIEYEGQYIDKQYEEFIPSVAPLSQDRLWQAVESLTQSNETIVAEQGTSFFGASTIPLKSNSRFIGQPLWGSIGYTFPAALGSQIADDESRHLLFIGDGSLQLTVQELGLAIREKLNPICFIINNDGYTVEREIHGPTQPYNDIPMWNYSKLPETFGATEDRVVSKIVRTENEFVSVMKEAQADVNRMYWIELVLEKEDAPKLLKKMGKLFAEQNK

SEQ ID NO: 317 - DNA, 1641 bp, Artificial Sequence
  Variant of branched-chain keto acid decarboxylase (kdcA) from Lactococcus lactis
atgtacaccgttggcgactatctgctggaccgtctgcatgaactgggaattgaagaaatctttggcgtgccgggcgattacaatctgcaattcctggatcaaatcatttcgcgcgaagatatgaaatggattggtaacgcgaatgaactgaatgcgagctacatggctgatggctatgcacgtacgaagaaggcggcggcgttcctgacgaccttcggtgttggtgaactgagcgcaatcaatgggttggcgggcagctatgcagagaacctgccagtcgtggaaatcgttgggagtccgacctcgaaggtgcagaacgatggcaagttcgttcatcacaccctggccgacggcgacttcaagcacttcatgaagatgcacgaaccggtcaccgctgcacgtacactgctgaccgccgagaacgcgacctacgagattgaccgcgtgctgagccaactgctgaaagaacgtaaacctgtgtacatcaacctgccggttgatgtcgccgcggcgaaagccgagaaaccagctctgagcctggagaaagaaagcagcacgaccaacaccacagaacaggtgatcctgtcgaagatcgaagaaagcctgaagaacgcccagaaaccggtcgtgatcgctgggcacgaggtgattagcttcggtctggagaagacggttacgcagtttgttagtgaaaccaacctgccgattactaccctgaactttggcaaatcggctgtggatgaatccctgccgtccttcctgggtatctacaatggtaaactgagcgagattagcctcaagaactttgtggaaagcgcagacttcatcctgatgcttggtgtgaaactgacggatagcagtacgggcgcgtttacgcaccatctggacgagaacaagatgattagcctgaacattgatgaaggcatcatcttcaacaaagtcgtagaagacttcgattttcgagcggttgttagcagcctgagcgagctgaaaggcattgaatacgaaggtcagtacattgataagcagtacgaagagttcattccgaaggatgcaccactgacccaagaccgtctgtggcaagcagtagaatctctgacacagtccaatgaaaccattgtggcggaacagggcacgtcgttcttcggtgcctccaccatccccctgaagagcaattcacatttcatcggtcagccgctttggggcagcatcggctatacgtttccggcagcactgggatcacagattgcggataaggaaagtcgccatctgctgttcattggtgatggtagcctgcaactgaccgtgcaggagctgggcctgtcgatccgtgagaaactgaacccgatttgtttcatcatcaacaacgatggctataccgtagagcgcgagattcatgggcctacacagagctacaatgacatcccgatgtggaactatagcaaactgccggaaacctttggcgcgacggaagatcgcgtagttagcaagatcgttcgcacagagaacgagtttgtgagtgtcatgaaagaagcgcaggccgatgttaaccgcatgtattggattgaactggttctggagaaagaagatgcaccgaaactgctgaagaagatggggaagctgtttgcagaacagaacaaa

SEQ ID NO: 318 - protein, 547 aa, Artificial Sequence
  Variant of branched-chain keto acid decarboxylase (kdcA) from Lactococcus lactis
MYTVGDYLLDRLHELGIEEIFGVPGDYNLQFLDQIISREDMKWIGNANELNASYMADGYARTKKAAAFLTTFGVGELSAINGLAGSYAENLPVVEIVGSPTSKVQNDGKFVHHTLADGDFKHFMKMHEPVTAARTLLTAENATYEIDRVLSQLLKERKPVYINLPVDVAAAKAEKPALSLEKESSTTNTTEQVILSKIEESLKNAQKPVVIAGHEVISFGLEKTVTQFVSETNLPITTLNFGKSAVDESLPSFLGIYNGKLSEISLKNFVESADFILMLGVKLTDSSTGAFTHHLDENKMISLNIDEGIIFNKVVEDFDFRAVVSSLSELKGIEYEGQYIDKQYEEFIPKDAPLTQDRLWQAVESLTQSNETIVAEQGTSFFGASTIPLKSNSHFIGQPLWGSIGYTFPAALGSQIADKESRHLLFIGDGSLQLTVQELGLSIREKLNPICFIINNDGYTVEREIHGPTQSYNDIPMWNYSKLPETFGATEDRVVSKIVRTENEFVSVMKEAQADVNRMYWIELVLEKEDAPKLLKKMGKLFAEQNK

SEQ ID NO: 319 - DNA, 1641 bp, Artificial Sequence
  Variant of branched-chain keto acid decarboxylase (kdcA) from Lactococcus lactis
atgtacaccgttggcgactatctgctggaccgtctgcatgaactgggaattgaagaaatctttggcgtgccgggcgattacaatctgcaattcctggatcaaatcattagccgcgaagatatgaaatggattggtaacgcgaatgaactgaatgcgagctacatggctgatggctatgcacgtacgaagaaggcggcggcgttcctgacgaccttcggtgttggtgaactgagcgcaatcaatgggttggcgggcagctatgcagagaacctgccagtcgtggaaatcgttgggagtccgacctcgaaggtgcagaacgatggcaagttcgttcatcacaccctggccgacggcgacttcaagcacttcatgaagatgcacgaaccggtcaccgctgcacgtacactgctgaccgccgagaacgcgacctacgagattgaccgcgtgctgagccaactgctgaaagaacgtaaacctgtgtacatcaacctgccggttgatgtcgccgcggcgaaagccgagaaaccagctctgagcctggagaaagaaagcagcacgaccaacaccacagaacaggtgatcctgtcgaagatcgaagaaagcctgaagaacgcccagaaaccggtcgtgatcgctgggcacgaggtgattagcttcggtctggagaagacggttacgcagtttgtgagtgaaaccaaactgccgattactaccctgaactttggcaaatcggctgtggatgaatccctgccgtccttcctgggtatctacaatggtaaactgagcgagattagcctcaagaactttgtggaaagcgcagacttcatcctgatgcttggtgtgaaactgacggatagcagtacgggcgcgtttacgcaccatctggacgagaacaagatgattagcctgaacattgatgaaggcatcatcttcaacaaagtcgtagaagacttcgatttccgtgcggttgttagcagcctgagcgagctgaaaggcattgaatacgaaggtcagtacattgataagcagtacgaagagttcattccgaaggatgaaccactgacccaagaccgtctgtggcaagcagtagaatctctgacacagtccaatgaaaccattgtggcggaacagggcacgtcgttcttcggtgcctccaccatccccctgaagagcaattcacatttcatcggtcagccgctttggggcagcatcggctatacgtttccggcagcactgggatcacagattgcggataaggaaagtcgccatctgctgttcattggtgatggtagcctgcaactgaccgtgcaggagctgggcctgtcgatccgtgagaaactgaacccgatttgtttcatcatcaacaacgatggctataccgtagagcgcgagattcatgggcctacacagagctacaatgacatcccgatgtggaactatagcaaactgccggaaacctttggcgcgacggaagatcgcgtagttagcaagatcgttcgcacagagaacgagtttgtgagtgtcatgaaagaagcgcaggccgatgttaaccgcatgtattggattgaactggttctggagaaagaagatgcaccgaaactgctgaagaagatggggaagctgtttgcagaacagaacaaa

SEQ ID NO: 320 - protein, 547 aa, Artificial Sequence
  Variant of branched-chain keto acid decarboxylase (kdcA) from Lactococcus lactis
MYTVGDYLLDRLHELGIEEIFGVPGDYNLQFLDQIISREDMKWIGNANELNASYMADGYARTKKAAAFLTTFGVGELSAINGLAGSYAENLPVVEIVGSPTSKVQNDGKFVHHTLADGDFKHFMKMHEPVTAARTLLTAENATYEIDRVLSQLLKERKPVYINLPVDVAAAKAEKPALSLEKESSTTNTTEQVILSKIEESLKNAQKPVVIAGHEVISFGLEKTVTQFVSETKLPITTLNFGKSAVDESLPSFLGIYNGKLSEISLKNFVESADFILMLGVKLTDSSTGAFTHHLDENKMISLNIDEGIIFNKVVEDFDFRAVVSSLSELKGIEYEGQYIDKQYEEFIPKDEPLTQDRLWQAVESLTQSNETIVAEQGTSFFGASTIPLKSNSHFIGQPLWGSIGYTFPAALGSQIADKESRHLLFIGDGSLQLTVQELGLSIREKLNPICFIINNDGYTVEREIHGPTQSYNDIPMWNYSKLPETFGATEDRVVSKIVRTENEFVSVMKEAQADVNRMYWIELVLEKEDAPKLLKKMGKLFAEQNK

SEQ ID NO: 321 - DNA, 1641 bp, Artificial Sequence
  Variant of branched-chain keto acid decarboxylase (kdcA) from Lactococcus lactis
atgtacaccgttggcgactatctgctggaccgtctgcatgaactgggaattgaagaaatctttggcgtgccgggcgattacaatctgcaattcctggatcaaatcattgcgcgcgaagatatgaaatggattggtaacgcgaatgaactgaatgcgagctacatggctgatggctatgcacgtacgaagaaggcggcggcgttcctgacgaccttcggtgttggtgaactgagcgcaatcaatgggttggcgggcagctatgcagagaacctgccagtcgtggaaatcgttgggagtccgacctcgaaggtgcagaacgatggcaagttcgttcatcacaccctggccgacggcgacttcaagcacttcatgaagatgcacgaaccggtcaccgctgcacgtacactgctgaccgccgagaacgcgacctacgagattgaccgcgtgctgagccaactgctgaaagaacgtaaacctgtgtacatcaacctgccggttgatgtcgccgcggcgaaagccgagaaaccagctctgagcctggagaaagaaagcagcacgaccaacaccacagaacaggtgatcctgtcgaagatcgaagaaagcctgaagaacgcccagaaaccggtcgtgatcgctgggcacgaggtgattagcttcggtctggagaagacggttacgcagtttgttagtgaaaccaaactgccgattactaccctgaactttggcaaatcggctgtggatgaatccctgccgtccttcctgggtatctacaatggtaaactgagcgagattagcctcaagaactttgtggaaagcgcagacttcatcctgatgcttggtgtgaaactgacggatagcagtacgggcgcgtttacgcaccatctggacgagaacaagatgattagcctgaacattgatgaaggcatcatcttcaacaaagtcgtagaagacttcgattttcgagcggttgttagcagcctgagcgagctgaaaggcattgaatacgaaggtcagtacattgataagcagtacgaagagttcattccgtctgatgcaccactgagccaagaccgtctgtggcaagcagtagaatctctgacacagtccaatgaaaccattgtggcggaacagggcacgtcgttcttcggtgcctccaccatccccctgaagagcaattcacgtttcatcggtcagccgctttggggcagcatcggctatacgtttccggcagcactgggatcacagattgcggataaggaaagtcgccatctgctgttcattggtgatggtagcctgcaactgaccgtgcaggagctgggcctgtcgatccgtgagaaactgaacccgatttgtttcatcatcaacaacgatggctataccgtagagcgcgagattcatgggcctacacagagctacaatgacatcccgatgtggaactatagcaaactgccggaaacctttggcgcgacggaagatcgcgtagttagcaagatcgttcgcacagagaacgagtttgtgagtgtcatgaaagaagcgcaggccgatgttaaccgcatgtattggattgaactggttctggagaaagaagatgcaccgaaactgctgaagaagatggggaagctgtttgcagaacagaacaaa

SEQ ID NO: 322 - protein, 547 aa, Artificial Sequence
  Variant of branched-chain keto acid decarboxylase (kdcA) from Lactococcus lactis
MYTVGDYLLDRLHELGIEEIFGVPGDYNLQFLDQIIAREDMKWIGNANELNASYMADGYARTKKAAAFLTTFGVGELSAINGLAGSYAENLPVVEIVGSPTSKVQNDGKFVHHTLADGDFKHFMKMHEPVTAARTLLTAENATYEIDRVLSQLLKERKPVYINLPVDVAAAKAEKPALSLEKESSTTNTTEQVILSKIEESLKNAQKPVVIAGHEVISFGLEKTVTQFVSETKLPITTLNFGKSAVDESLPSFLGIYNGKLSEISLKNFVESADFILMLGVKLTDSSTGAFTHHLDENKMISLNIDEGIIFNKVVEDFDFRAVVSSLSELKGIEYEGQYIDKQYEEFIPSDAPLSQDRLWQAVESLTQSNETIVAEQGTSFFGASTIPLKSNSRFIGQPLWGSIGYTFPAALGSQIADKESRHLLFIGDGSLQLTVQELGLSIREKLNPICFIINNDGYTVEREIHGPTQSYNDIPMWNYSKLPETFGATEDRVVSKIVRTENEFVSVMKEAQADVNRMYWIELVLEKEDAPKLLKKMGKLFAEQNK

SEQ ID NO: 323 - DNA, 1641 bp, Artificial Sequence
  Variant of branched-chain keto acid decarboxylase (kdcA) from Lactococcus lactis
atgtacaccgttggcgactatctgctggaccgtctgcatgaactgggaattgaagaaatctttggcgtgccgggcgattacaatctgcaattcctggatcaaatcattgcgcgcgaagatatgaaatggattggtaacgcgaatgaactgaatgcgagctacatggctgatggctatgcacgtacgaagaaggcggcggcgttcctgacgaccttcggtgttggtgaactgagcgcaatcaatgggttggcgggcagctatgcagagaacctgccagtcgtggaaatcgttgggagtccgacctcgaaggtgcagaacgatggcaagttcgttcatcacaccctggccgacggcgacttcaagcacttcatgaagatgcacgaaccggtcaccgctgcacgtacactgctgaccgccgagaacgcgaccacagagattgaccgcgtgctgagccaactgctgaaagaacgtaaacctgtgtacatcaacctgccggttgatgtcgccgcggcgaaagccgagaaaccagctctgagcctggagaaagaaagcagcacgaccaacaccacagaacaggtgatcctgtcgaagatcgaagaaagcctgaagaacgcccagaaaccggtcgtgatcgctgggcacgaggtgattagcttcggtctggagaagacggttacgcagtttgtgagtgaaaccaaactgccgattactaccctgaactttggcaaatcggctgtggatgaatccctgccgtccttcctgggtatctacaatggtaaactgagcgagattagcctcaagaactttgtggaaagcgcagacttcatcctgatgcttggtgtgaaactgacggatagcagtacgggcgcgtttacgcaccatctggacgagaacaagatgattagcctgaacattgatgaaggcatcatcttcaacaaagtcgtagaagacttcgatttccgtgcggttgttagcagcctgagcgagctgaaaggcattgaatacgaaggtcagtacattgataagcagtacgaagagttcattccgtctgatgaaccactgagccaagaccgtctgtggcaagcagtagaatctctgacacagtccaatgaaaccattgtggcggaacagggcacgtcgttcttcggtgcctccaccatcttcctgaagagcaattcacgtttcatcggtcagccgctttggggcagcatcggctatacgtttccggcagcactgggatcacagattgcggataaggaaagtcgccatctgctgttcattggtgatggtagcctgcaactgaccgtgcaggagctgggcctgtcgatccgtgagaaactgaacccgatttgtttcatcatcaacaacgatggctataccgtagagcgcgagattcatgggcctacacagagctacaatgacatcccgatgtggaactatagcaaactgccggaaacctttggcgcgacggaagatcgcgtagttagcaagatcgttcgcacagagaacgagtttgtgagtgtcatgaaagaagcgcaggccgatgttaaccgcatgtattggattgaactggttctggagaaagaagatgcaccgaaactgctgaagaagatggggaagctgtttgcagaacagaacaaa

SEQ ID NO: 324 - protein, 547 aa, Artificial Sequence
  Variant of branched-chain keto acid decarboxylase (kdcA) from Lactococcus lactis
MYTVGDYLLDRLHELGIEEIFGVPGDYNLQFLDQIIAREDMKWIGNANELNASYMADGYARTKKAAAFLTTFGVGELSAINGLAGSYAENLPVVEIVGSPTSKVQNDGKFVHHTLADGDFKHFMKMHEPVTAARTLLTAENATTEIDRVLSQLLKERKPVYINLPVDVAAAKAEKPALSLEKESSTTNTTEQVILSKIEESLKNAQKPVVIAGHEVISFGLEKTVTQFVSETKLPITTLNFGKSAVDESLPSFLGIYNGKLSEISLKNFVESADFILMLGVKLTDSSTGAFTHHLDENKMISLNIDEGIIFNKVVEDFDFRAVVSSLSELKGIEYEGQYIDKQYEEFIPSDEPLSQDRLWQAVESLTQSNETIVAEQGTSFFGASTIFLKSNSRFIGQPLWGSIGYTFPAALGSQIADKESRHLLFIGDGSLQLTVQELGLSIREKLNPICFIINNDGYTVEREIHGPTQSYNDIPMWNYSKLPETFGATEDRVVSKIVRTENEFVSVMKEAQADVNRMYWIELVLEKEDAPKLLKKMGKLFAEQNK

SEQ ID NO: 325 - DNA, 1641 bp, Artificial Sequence
  Variant of branched-chain keto acid decarboxylase (kdcA) from Lactococcus lactis
atgtacaccgttggcgactatctgctggaccgtctgcatgaactgggaattgaagaaatctttggcgtgccgggcgattacaatctgcaattcctggatcaaatcattagccgcgaagatatgaaatggattggtaacgcgaatgaactgaatgcgagctacatggctgatggctatgcacgtacgaagaaggcggcggcgttcctgacgaccttcggtgttggtgaactgagcgcaatcaatgggttggcgggcagctatgcagagaacctgccagtcgtggaaatcgttgggagtccgacctcgaaggtgcagaacgatggcaagttcgttcatcacaccctggccgacggcgacttcaagcacttcatgaagatgcacgaaccggtcaccgctgcacgtacactgctgaccgccgagaacgcgacctatgagattgaccgcgtgctgagccaactcctgaaagaacgtaaacctgtgtacatcaacctgccggttgatgtcgccgcggcgaaagccgagaaaccagctctgagcctggagaaagaaagcagcacgaccaacaccacagaacaggtgatcctgtcgaagatcgaagaaagcctgaagaacgcccagaaaccggtcgtgatcgctgggcacgaggtgattagcttcggtctggagaagacggttacgcagtttgtgagtgaaaccaaactgccgattactaccctgaactttggcaaatcggctgtggatgaatccctgccgcacttcctgggtatctacaatggtaaactgagcgagattagcctcaagaactttgtggaaagcgcagacttgatcctgatgcttggtgtgaaactgacggatagcagtacgggcgcgtttacgcaccatctggacgagaacaagatgattagcctgaacattgatgaaggcatcatcttcaacaaagtcgtagaagacttcgatttccgtgcggttgttagcagcctgagcgagctgaaaggcattgaatacgaaggtcagtacattgataagcagtacgaagagttcattccgagcagcgcaccactgagccaagaccgtctgtggcaagcagtagaatctctgacacagtccaatgaaaccattgtggcggaacagggcacgtcgttcttcggtgcctccaccatcttcctgaagagcaattcacgcttcatcggtcagccgctttggggcagcatcggctatacgtttccggcagcactgggatcacagattgcggataaggaaagtcgccatctgctgttcattggtgatggtagcctgcaactgaccgtgcaggagctgggcctggcgatccgtgagaaactgaacccgatttgtttcatcatcaacaacgatggctataccgtagagcgcgagattcatgggcctacacagagctacaatgacatcccgatgtggaactatagcaaactgccggaaacctttggcgcgacggaagatcgcgtagttagcaagatcgttcgcacagagaacgagtttgtgagtgtcatgaaagaagcgcaggccgatgttaaccgcatgtattggattgaactggttctggagaaagaagatgcaccgaaactgctgaagaagatggggaagctgtttgcagaacagaacaaa

SEQ ID NO: 326 - protein, 547 aa, Artificial Sequence
  Variant of branched-chain keto acid decarboxylase (kdcA) from Lactococcus lactis
MYTVGDYLLDRLHELGIEEIFGVPGDYNLQFLDQIISREDMKWIGNANELNASYMADGYARTKKAAAFLTTFGVGELSAINGLAGSYAENLPVVEIVGSPTSKVQNDGKFVHHTLADGDFKHFMKMHEPVTAARTLLTAENATYEIDRVLSQLLKERKPVYINLPVDVAAAKAEKPALSLEKESSTTNTTEQVILSKIEESLKNAQKPVVIAGHEVISFGLEKTVTQFVSETKLPITTLNFGKSAVDESLPHFLGIYNGKLSEISLKNFVESADLILMLGVKLTDSSTGAFTHHLDENKMISLNIDEGIIFNKVVEDFDFRAVVSSLSELKGIEYEGQYIDKQYEEFIPSSAPLSQDRLWQAVESLTQSNETIVAEQGTSFFGASTIFLKSNSRFIGQPLWGSIGYTFPAALGSQIADKESRHLLFIGDGSLQLTVQELGLAIREKLNPICFIINNDGYTVEREIHGPTQSYNDIPMWNYSKLPETFGATEDRVVSKIVRTENEFVSVMKEAQADVNRMYWIELVLEKEDAPKLLKKMGKLFAEQNK

SEQ ID NO: 327 - DNA, 1641 bp, Artificial Sequence
  Variant of branched-chain keto acid decarboxylase (kdcA) from Lactococcus lactis
atgtacaccgttggcgactatctgctggaccgtctgcatgaactgggaattgaagaaatctttggcgtgccgggcgattacaatctgcaattcctggatcaaatcattagccgcgaagatatgaaatggattggtaacgcgaatgaactgaatgcgagctacatggctgatggctatgcacgtacgaagaaggcggcggcgttcctgacgaccttcggtgttggtgaactgagcgcaatcaatgggttggcgggcagctatgcagagaacctgccagtcgtggaaatcgttgggagtccgacctcgaaggtgcagaacgatggcaagttcgttcatcacaccctggccgacggcgacttcaagcacttcgagaagatgcacgaaccggtcaccgctgcacgtacactgctgaccgccgagaacgcgacctatgagattgaccgcgtgctgagccaagcgctgaaagaacgtaaacctgtgtacatcaacctgccggttgatgtcgccgcggcgaaagccgagaaaccagctctgagcctggagaaagaaagcagcacgaccaacaccacagaacaggtgatcctgtcgaagatcgaagaaagcctgaagaacgcccagaaaccggtcgtgatcgctgggcacgaggtgattagcttcggtctggagaagacggttacgcagtttgtgagtgaaaccaaactgccgattactaccctgaactttggcaaatcggctgtggatgaatccctgccgtccttcctgggtatctacaatggtaaactgagcgagattagcctcaagaactttgtggaaagcgcagacttcatcctgatgcttggtgtgaaactgacggatagcagtacgggcgcgtttacgcaccatctggacgagaacaagatgattagcctgaacattgatgaaggcatcatcttcaacaaagtcgtagaagacttcgatttccgtgcggttgttagcagcctgagcgagctgaaaggcattgaatacgaaggtcagtacattgataagcagtacgaagagttcattccgagcagcgcaccactgagccaagaccgtctgtggcaagcagtagaatctctgacacagtccaatgaaaccattgtggcggaacagggcacgtcgttcttcggtgcctccaccatcttcctgaagagcaattcacgcttcatcggtcagccgctttggggcagcatcggctatacgtttccggcagcactgggatcacagattgcggataaggaaagtcgccatctgctgttcattggtgatggtagcctgcaactgaccgtgcaggagctgggcctggcgatccgtgagaaactgaacccgatttgtttcatcatcaacaacgatggctataccgtagagcgcgagattcatgggcctacacagagctacaatgacatcccgatgtggaactatagcaaactgccggaaacctttggcgcgacggaagatcgcgtagttagcaagatcgttcgcacagagaacgagtttgtgagtgtcatgaaagaagcgcaggccgatgttaaccgcatgtattggattgaactggttctggagaaagaagatgcaccgaaactgctgaagaagatggggaagctgtttgcagaacagaacaaa

SEQ ID NO: 328 - protein, 547 aa, Artificial Sequence
  Variant of branched-chain keto acid decarboxylase (kdcA) from Lactococcus lactis
MYTVGDYLLDRLHELGIEEIFGVPGDYNLQFLDQIISREDMKWIGNANELNASYMADGYARTKKAAAFLTTFGVGELSAINGLAGSYAENLPVVEIVGSPTSKVQNDGKFVHHTLADGDFKHFEKMHEPVTAARTLLTAENATYEIDRVLSQALKERKPVYINLPVDVAAAKAEKPALSLEKESSTTNTTEQVILSKIEESLKNAQKPVVIAGHEVISFGLEKTVTQFVSETKLPITTLNFGKSAVDESLPSFLGIYNGKLSEISLKNFVESADFILMLGVKLTDSSTGAFTHHLDENKMISLNIDEGIIFNKVVEDFDFRAVVSSLSELKGIEYEGQYIDKQYEEFIPSSAPLSQDRLWQAVESLTQSNETIVAEQGTSFFGASTIFLKSNSRFIGQPLWGSIGYTFPAALGSQIADKESRHLLFIGDGSLQLTVQELGLAIREKLNPICFIINNDGYTVEREIHGPTQSYNDIPMWNYSKLPETFGATEDRVVSKIVRTENEFVSVMKEAQADVNRMYWIELVLEKEDAPKLLKKMGKLFAEQNK

SEQ ID NO: 329 - DNA, 1641 bp, Artificial Sequence
  Variant of branched-chain keto acid decarboxylase (kdcA) from Lactococcus lactis
atgtacaccgttggcgactatctgctggaccgtctgcatgaactgggaattgaagaaatctttggcgtgccgggcgattacaatctgcaattcctggatcaaatcatttcgcgcgaagatatgaaatggattggtaacgcgaatgaactgaatgcgagctacatggctgatggctatgcacgtacgaagaaggcggcggcgttcctgacgaccttcggtgttggtgaactgagcgcaatcaatgggttggcgggcagctatgcagagaacctgccagtcgtggaaatcgttgggagtccgacctcgaaggtgcagaacgatggcaagttcgttcatcacaccctggccgacggcgacttcaagcacttcatgaagatgcacgaaccggtcaccgctgcacgtacactgctgaccgccgagaacgcgaccacagagattgaccgcgtgctgagccaactgctgaaagaacgtaaacctgtgtacatcaacctgccggttgatgtcgccgcggcgaaagccgagaaaccagctctgagcctggagaaagaaagcagcacgaccaacaccacagaacaggtgatcctgtcgaagatcgaagaaagcctgaagaacgcccagaaaccggtcgtgatcgctgggcacgaggtgattagcttcggtctggagaagacggttacgcagtttgtgagtgaaaccaaactgccgattactaccctgaactttggcaaatcggctgtggatgaatccctgccgtccttcctgggtatctacaatggtaaactgagcgagattagcctcaagaactttgtggaaagcgcagacttcatcctgatgcttggtgtgaaactgacggatagcagtacgggcgcgtttacgcaccatctggacgagaacaagatgattagcctgaacattgatgaaggcatcatcttcaacaaagtcgtagaagacttcgatttccgtgcggttgttagcagcctgagcgagctgaaaggcattgaatacgaaggtcagtacattgataagcagtacgaagagttcattccgagcagcgcaccactgagccaagaccgtctgtggcaagcagtagaatctctgacacagtccaatgaaaccattgtggcggaacagggcacgtcgttcttcggtgcctccaccatcttcctgaagagcaattcacatttcatcggtcagccgctttggggcagcatcggctatacgtttccggcagcactgggatcacagattgcggataaggaaagtcgccatctgctgttcattggtgatggtagcctgcaactgaccgtgcaggagctgggcctgtcgatccgtgagaaactgaacccgatttgtttcatcatcaacaacgatggctataccgtagagcgcgagattcatgggcctacacagagctacaatgacatcccgatgtggaactatagcaaactgccggaaacctttggcgcgacggaagatcgcgtagttagcaagatcgttcgcacagagaacgagtttgtgagtgtcatgaaagaagcgcaggccgatgttaaccgcatgtattggattgaactggttctggagaaagaagatgcaccgaaactgctgaagaagatggggaagctgtttgcagaacagaacaaa

SEQ ID NO: 330 - protein, 547 aa, Artificial Sequence
  Variant of branched-chain keto acid decarboxylase (kdcA) from Lactococcus lactis
MYTVGDYLLDRLHELGIEEIFGVPGDYNLQFLDQIISREDMKWIGNANELNASYMADGYARTKKAAAFLTTFGVGELSAINGLAGSYAENLPVVEIVGSPTSKVQNDGKFVHHTLADGDFKHFMKMHEPVTAARTLLTAENATTEIDRVLSQLLKERKPVYINLPVDVAAAKAEKPALSLEKESSTTNTTEQVILSKIEESLKNAQKPVVIAGHEVISFGLEKTVTQFVSETKLPITTLNFGKSAVDESLPSFLGIYNGKLSEISLKNFVESADFILMLGVKLTDSSTGAFTHHLDENKMISLNIDEGIIFNKVVEDFDFRAVVSSLSELKGIEYEGQYIDKQYEEFIPSSAPLSQDRLWQAVESLTQSNETIVAEQGTSFFGASTIFLKSNSHFIGQPLWGSIGYTFPAALGSQIADKESRHLLFIGDGSLQLTVQELGLSIREKLNPICFIINNDGYTVEREIHGPTQSYNDIPMWNYSKLPETFGATEDRVVSKIVRTENEFVSVMKEAQADVNRMYWIELVLEKEDAPKLLKKMGKLFAEQNK

SEQ ID NO: 331 - DNA, 1641 bp, Artificial Sequence
  Variant of branched-chain keto acid decarboxylase (kdcA) from Lactococcus lactis
atgtacaccgttggcgactatctgctggaccgtctgcatgaactgggaattgaagaaatctttggcgtgccgggcgattacaatctgcaattcctggatcaaatcattagccgcgaagatatgaaatggattggtaacgcgaatgaactgaatgcgagctacatggctgatggctatgcacgtacgaagaaggcggcggcgttcctgacgaccttcggtgttggtgaactgagcgcaatcaatgggttggcgggcagctatgcagagaacctgccagtcgtggaaatcgttgggagtccgacctcgaaggtgcagaacgatggcaagttcgttcatcacaccctggccgacggcgacttcaagcacttcatgaagatgcacgaaccggtcaccgctgcacgtacactgctgaccgccgagaacgcgacctatgagattgaccgcgtgctgagccaactcctgaaagaacgtaaacctgtgtacatcaacctgccggttgatgtcgccgcggcgaaagccgagaaaccagctctgagcctggagaaagaaagcagcacgaccaacaccacagaacaggtgatcctgtcgaagatcgaagaaagcctgaagaacgcccagaaaccggtcgtgatcgctgggcacgaggtgattagcttcggtctggagaagacggttacgcagtttgtgagtgaaaccaaactgccgattactaccctgaactttggcaaatcggctgtggatgaatccctgccgtccttcctgggtatctacaatggtaaactgagcgagattagcctcaagaactttgtggaaagcgcagactttatcctgatgcttggtgtgaaactgacggatagctcgacgggcggctttacgcaccatctggacgagaacaagatgattagcctgaacattgatgaaggcatcatcttcaacaaagtcgtagaagacttcgatttccgtgcggttgttagcagcctgagcgagctgaaaggcattgaatacgaaggtcagtacattgataagcagtacgaagagttcattccgagcagcgcaccactgagccaagaccgtctgtggcaagcagtagaatctctgacacagtccaatgaaaccattgtggcggaacagggcacgtcgttcttcggtgcctccaccatcttcctgaagagcaattcacgcttcatcggtcagccgctttggggcagcatcggctatacgtttccggcagcactgggatcacagattgcggataaggaaagtcgccatctgctgttcattggtgatggtagcctgcaactgaccgtgcaggagctgggcctgtcgatccgtgagaaactgaacccgatttgtttcatcatcaacaacgatggctataccgtagagcgcgagattcatgggcctacacagagctacaatgacatcccgatgtggaactatagcaaactgccggaaacctttggcgcgacggaagatcgcgtagttagcaagatcgttcgcacagagaacgagtttgtgagtgtcatgaaagaagcgcaggccgatgttaaccgcatgtattggattgaactggttctggagaaagaagatgcaccgaaactgctgaagaagatggggaagatttttgcagaacagaacaaa

SEQ ID NO: 332 - protein, 547 aa, Artificial Sequence
  Variant of branched-chain keto acid decarboxylase (kdcA) from Lactococcus lactis
MYTVGDYLLDRLHELGIEEIFGVPGDYNLQFLDQIISREDMKWIGNANELNASYMADGYARTKKAAAFLTTFGVGELSAINGLAGSYAENLPVVEIVGSPTSKVQNDGKFVHHTLADGDFKHFMKMHEPVTAARTLLTAENATYEIDRVLSQLLKERKPVYINLPVDVAAAKAEKPALSLEKESSTTNTTEQVILSKIEESLKNAQKPVVIAGHEVISFGLEKTVTQFVSETKLPITTLNFGKSAVDESLPSFLGIYNGKLSEISLKNFVESADFILMLGVKLTDSSTGGFTHHLDENKMISLNIDEGIIFNKVVEDFDFRAVVSSLSELKGIEYEGQYIDKQYEEFIPSSAPLSQDRLWQAVESLTQSNETIVAEQGTSFFGASTIFLKSNSRFIGQPLWGSIGYTFPAALGSQIADKESRHLLFIGDGSLQLTVQELGLSIREKLNPICFIINNDGYTVEREIHGPTQSYNDIPMWNYSKLPETFGATEDRVVSKIVRTENEFVSVMKEAQADVNRMYWIELVLEKEDAPKLLKKMGKIFAEQNK

SEQ ID NO: 333 - DNA, 1641 bp, Artificial Sequence
  Variant of branched-chain keto acid decarboxylase (kdcA) from Lactococcus lactis
atgtacaccgttggcgactatctgctggaccgtctgcatgaactgggaattgaagaaatctttggcgtgccgggcgattacaatctgcaattcctggatcaaatcattagccgcgaagatatgaaatggattggtaacgcgaatgaactgaatgcgagctacatggctgatggctatgcacgtacgaagaaggcggcggcgttcctgacgaccttcggtgttggtgaactgagcgcaatcaatgggttggcgggcagctatgcagagaacctgccagtcgtggaaatcgttgggagtccgacctcgaaggtgcagaacgatggcaagttcgttcatcacaccctggccgacggcgacttcaagcacttcatgaagatgcacgaaccggtcaccgctgcacgtacactgctgaccgccgagaacgcgacctatgagattgaccgcgtgctgagccaactgctgaaagaacgtaaacctgtgtacatcaacctgccggttgatgtcgccgcggcgaaagccgagaaaccagctctgagcctggagaaagaaagcagcacgaccaacaccacagaacaggtgatcctgtcgaagatcgaagaaagcctgaagaacgcccagaaaccggtcgtgatcgctgggcacgaggtgattagcttcggtctggagaagacggttacgcagtttgtgagtgaaaccaaactgccgattactaccctgaactttggcaaatcggctgtggatgaatccctgccgtccttcctgggtatctacaatggtaaactgagcgagattagcctcaagaactttgtggaaagcgcagacttcatcctgatgcttggtgtgaaactgacggatagcagtacgggcgcgtttacgcaccatctggacgagaacaagatgattagcctgaacattgatgaaggcatcatcttcaacaaagtcgtagaagacttcgatttccgtgcggttgttagcagcctgagcgagctgaaaggcattgaatacgaaggtcagtacattgataagcagtacgaagagttcattccgagcagcgcaccactgagccaagaccgtctgtggcaagcagtagaatctctgacacagtccaatgaaaccattgtggcggaacagggcacgtcgttcttcggtgcctccaccatccccctgaagagcaattcacatttcatcggtcagccgctttggggcagcatcggctatacgtttccggcagcactgggatcacagattgcggataaggaaagtcgccatctgctgttcattggtgatggtagcctgcaactgaccgtgcaggagctgggcctgtcgatccgtgagaaactgaacccgatttgtttcatcatcaacaacgatggctataccgtagagcgcgagattcatgggcctacacagagctacaatgacatcccgatgtggaactatagcaaactgccggaaacctttggcgcgacggaagatcgcgtagttagcaagatcgttcgcacagagaacgagtttgtgagtgtcatgaaagaagcgcaggccgatgttaaccgcatgtattggattgaactggttctggagaaagaagatgcaccgaaactgctgaagaagatggggaagctgtttgcagaacagaacaaa

SEQ ID NO: 334 - protein, 547 aa, Artificial Sequence
  Variant of branched-chain keto acid decarboxylase (kdcA) from Lactococcus lactis
MYTVGDYLLDRLHELGIEEIFGVPGDYNLQFLDQIISREDMKWIGNANELNASYMADGYARTKKAAAFLTTFGVGELSAINGLAGSYAENLPVVEIVGSPTSKVQNDGKFVHHTLADGDFKHFMKMHEPVTAARTLLTAENATYEIDRVLSQLLKERKPVYINLPVDVAAAKAEKPALSLEKESSTTNTTEQVILSKIEESLKNAQKPVVIAGHEVISFGLEKTVTQFVSETKLPITTLNFGKSAVDESLPSFLGIYNGKLSEISLKNFVESADFILMLGVKLTDSSTGAFTHHLDENKMISLNIDEGIIFNKVVEDFDFRAVVSSLSELKGIEYEGQYIDKQYEEFIPSSAPLSQDRLWQAVESLTQSNETIVAEQGTSFFGASTIPLKSNSHFIGQPLWGSIGYTFPAALGSQIADKESRHLLFIGDGSLQLTVQELGLSIREKLNPICFIINNDGYTVEREIHGPTQSYNDIPMWNYSKLPETFGATEDRVVSKIVRTENEFVSVMKEAQADVNRMYWIELVLEKEDAPKLLKKMGKLFAEQNK

SEQ ID NO: 335 - DNA, 1641 bp, Artificial Sequence
  Variant of branched-chain keto acid decarboxylase (kdcA) from Lactococcus lactis
atgtacaccgttggcgactatctgctggaccgtctgcatgaactgggaattgaagaaatctttggcgtgccgggcgattacaatctgcaattcctggatcaaatcattagccgcgaagatatgaaatggattggtaacgcgaatgaactgaatgcgagctacatggctgatggctatgcacgtacgaagaaggcggcggcgttcctgacgaccttcggtgttggtgaactgagcgcaatcaatgggttggcgggcagctatgcagagaacctgccagtcgtggaaatcgttgggagtccgacctcgaaggtgcagaacgatggcaagttcgttcatcacaccctggccgacggcgacttcaagcacttcatgaagatgcacgaaccggtcaccgctgcacgtacactgctgaccgccgagaacgcgacctatgagattgaccgcgtgctgagccaagcgctgaaagaacgtaaacctgtgtacatcaacctgccggttgatgtcgccgcggcgaaagccgagaaaccagctctgagcctggagaaagaaagcagcacgaccaacaccacagaacaggtgatcctgtcgaagatcgaagaaagcctgaagaacgcccagaaaccggtcgtgatcgctgggcacgaggtgattagcttcggtctggagaagacggttacgcagtttgtgagtgaaaccaaactgccgattactaccctgaactttggcaaatcggctgtggatgaatccctgccgtccttcctgggtatctacaatggtaaactgagcgagattagcctcaagaactttgtggaaagcgcagacttgatcctgatgcttggtgtgaaactgacggatagcagtacgggcgcgtttacgcaccatctggacgagaacaagatgattagcctgaacattgatgaaggcatcatcttcaacaaagtcgtagaagacttcgatttccgtgcggttgttagcagcctgagcgagctgaaaggcattgaatacgaaggtcagtacattgataagcagtacgaagagttcattccgagcagcgcaccactgagccaagaccgtctgtggcaagcagtagaatctctgacacagtccaatgaaaccattgtggcggaacagggcacgtcgttcttcggtgcctccaccatcttcctgaagagcaattcacgcttcatcggtcagccgctttggggcagcatcggctatacgtttccggcagcactgggatcacagattgcggataaggaaagtcgccatctgctgttcattggtgatggtagcctgcaactgaccgtgcaggagctgggcctgtcgatccgtgagaaactgaacccgatttgtttcatcatcaacaacgatggctataccgtagagcgcgagattcatgggcctacacagagctacaatgacatcccgatgtggaactatagcaaactgccggaaacctttggcgcgacggaagatcgcgtagttagcaagatcgttcgcacagagaacgagtttgtgagtgtcatgaaagaagcgcaggccgatgttaaccgcatgtattggattgaactggttctggagaaagaagatgcaccgaaactgctgaagaagatggggaagctttttgcagaacagaacaaa

SEQ ID NO: 336 - protein, 547 aa, Artificial Sequence
  Variant of branched-chain keto acid decarboxylase (kdcA) from Lactococcus lactis
MYTVGDYLLDRLHELGIEEIFGVPGDYNLQFLDQIISREDMKWIGNANELNASYMADGYARTKKAAAFLTTFGVGELSAINGLAGSYAENLPVVEIVGSPTSKVQNDGKFVHHTLADGDFKHFMKMHEPVTAARTLLTAENATYEIDRVLSQALKERKPVYINLPVDVAAAKAEKPALSLEKESSTTNTTEQVILSKIEESLKNAQKPVVIAGHEVISFGLEKTVTQFVSETKLPITTLNFGKSAVDESLPSFLGIYNGKLSEISLKNFVESADLILMLGVKLTDSSTGAFTHHLDENKMISLNIDEGIIFNKVVEDFDFRAVVSSLSELKGIEYEGQYIDKQYEEFIPSSAPLSQDRLWQAVESLTQSNETIVAEQGTSFFGASTIFLKSNSRFIGQPLWGSIGYTFPAALGSQIADKESRHLLFIGDGSLQLTVQELGLSIREKLNPICFIINNDGYTVEREIHGPTQSYNDIPMWNYSKLPETFGATEDRVVSKIVRTENEFVSVMKEAQADVNRMYWIELVLEKEDAPKLLKKMGKLFAEQNK

SEQ ID NO: 337 - DNA, 1641 bp, Artificial Sequence
  Variant of branched-chain keto acid decarboxylase (kdcA) from Lactococcus lactis
atgtacaccgttggcgactatctgctggaccgtctgcatgaactgggaattgaagaaatctttggcgtgccgggcgattacaatctgcaattcctggatcaaatcattagccgcgaagatatgaaatggattggtaacgcgaatgaactgaatgcgagctacatggctgatggctatgcacgtacgaagaaggcggcggcgttcctgacgaccttcggtgttggtgaactgagcgcaatcaatgggttggcgggcagctatgcagagaacctgccagtcgtggaaatcgttgggagtccgacctcgaaggtgcagaacgatggcaagttcgttcatcacaccctggccgacggcgacttcaagcacttcatgaagatgcacgaaccggtcaccgctgcacgtacactgctgaccgccgagaacgcgacctacgagattgaccgcgtgctgagccaactgctgaaagaacgtaaacctgtgtacatcaacctgccggttgatgtcgccgcggcgaaagccgagaaaccagctctgagcctggagaaagaaagcagcacgaccaacaccacagaacaggtgatcctgtcgaagatcgaagaaagcctgaagaacgcccagaaaccggtcgtgatcgctgggcacgaggtgattagcttcggtctggagaagacggttacgcagtttattagtgaaaccaaactgccgattactaccctgaactttggcaaatcggctgtggatgaatccctgccgtccttcctgggtatctacaatggtaaactgagcgagattagcctcaagaactttgtggaaagcgcagacttcatcctgatgcttggtgtgaaactgacggatagcagtacgggcgcgtttacgcaccatctggacgagaacaagatgattagcctgaacattgatgaaggcatcatcttcaacaaagtcgtagaagacttcgatttccgtgcggttgttagcagcctgagcgagctgaaaggcattgaatacgaaggtcagtacattgataagcagtacgaagagttcattccgagcagcgcaccactgagccaagaccgtctgtggcaagcagtagaatctctgacacagtccaatgaaaccattgtggcggaacagggcacgtcgttcttcggtgcctccaccatcttcctgaagagcaattcacgcttcatcggtcagccgctttggggcagcatcggctatacgtttccggcagcactgggatcacagattgcggataaggaaagtcgccatctgctgttcattggtgatggtagcctgcaactgaccgtgcaggagctgggcctgtcgatccgtgagaaactgaacccgatttgtttcatcatcaacaacgatggctataccgtagagcgcgagattcatgggcctacacagagctacaatgacatcccgatgtggaactatagcaaactgccggaaacctttggcgcgacggaagatcgcgtagttagcaagatcgttcgcacagagaacgagtttgtgagtgtcatgaaagaagcgcaggccgatgttaaccgcatgtattggattgaactggttctggagaaagaagatgcaccgaaactgctgaagaagatggggaagctgtttgcagaacagaacaaa

SEQ ID NO: 338 - protein, 547 aa, Artificial Sequence
  Variant of branched-chain keto acid decarboxylase (kdcA) from Lactococcus lactis
MYTVGDYLLDRLHELGIEEIFGVPGDYNLQFLDQIISREDMKWIGNANELNASYMADGYARTKKAAAFLTTFGVGELSAINGLAGSYAENLPVVEIVGSPTSKVQNDGKFVHHTLADGDFKHFMKMHEPVTAARTLLTAENATYEIDRVLSQLLKERKPVYINLPVDVAAAKAEKPALSLEKESSTTNTTEQVILSKIEESLKNAQKPVVIAGHEVISFGLEKTVTQFISETKLPITTLNFGKSAVDESLPSFLGIYNGKLSEISLKNFVESADFILMLGVKLTDSSTGAFTHHLDENKMISLNIDEGIIFNKVVEDFDFRAVVSSLSELKGIEYEGQYIDKQYEEFIPSSAPLSQDRLWQAVESLTQSNETIVAEQGTSFFGASTIFLKSNSRFIGQPLWGSIGYTFPAALGSQIADKESRHLLFIGDGSLQLTVQELGLSIREKLNPICFIINNDGYTVEREIHGPTQSYNDIPMWNYSKLPETFGATEDRVVSKIVRTENEFVSVMKEAQADVNRMYWIELVLEKEDAPKLLKKMGKLFAEQNK

SEQ ID NO: 339 - DNA, 1641 bp, Artificial Sequence
  Variant of branched-chain keto acid decarboxylase (kdcA) from Lactococcus lactis
atgtacaccgttggcgactatctgctggaccgtctgcatgaactgggaattgaagaaatctttggcgtgccgggcgattacaatctgcaattcctggatcaaatcattagccgcgaagatatgaaatggattggtaacgcgaatgaactgaatgcgagctacatggctgatggctatgcacgtacgaagaaggcggcggcgttcctgacgaccttcggtgttggtgaactgagcgcaatcaatgggttggcgggcagctatgcagagaacctgccagtcgtggaaatcgttgggagtccgacctcgaaggtgcagaacgatggcaagttcgttcatcacaccctggccgacggcgacttcaagcacttcatgaagatgcacgaaccggtcaccgctgcacgtacactgctgaccgccgagaacgcgacctatgagattgaccgcgtgctgagccaactgctgaaagaacgtaaacctgtgtacatcaacctgccggttgatgtcgccgcggcgaaagccgagaaaccagctctgagcctggagaaagaaagcagcacgaccaacaccacagaacaggtgatcctgtcgaagatcgaagaaagcctgaagaacgcccagaaaccggtcgtgatcgctgggcacgaggtgattagcttcggtctggagaagacggttacgcagtttgtgagtaaatttaaactgccgattactaccctgaactttggcaaatcggctgtggatgaatccctgccgtccttcctgggtatctacaatggtaaactgagcgagattagcctcaagaactttgtggaaagcgcagacttgatcctgatgcttggtgcgaaactgacggatagcagtacgggcgcgtttacgcaccatctggacgagaacaagatgattagcctgaacattgatgaaggcatcatcttcaacaaagtcgtagaagacttcgatttccgtgcggttgttagcagcctgagcgagctgaaaggcattgaatacgaaggtcagtacattgataagcagtacgaagagttcattccgagcagcgcaccactgagccaagaccgtctgtggcaagcagtagaatctctgacacagtccaatgaaaccattgtggcggaacagggcacgtcgttcttcggtgcctccaccatcttcctgaagagcaattcacgtttcatcggtcagccgctttggggcagcatcggctatacgtttccggcagcactgggatcacagattgcggataaggaaagtcgccatctgctgttcattggtgatggtagcctgcaactgaccgtgcaggagctgggcctggcgatccgtgagaaactgaacccgatttgtttcatcatcaacaacgatggctataccgtagagcgcgagattcatgggcctacacagagctacaatgacatcccgatgtggaactatagcaaactgccggaaacctttggcgcgacggaagatcgcgtagttagcaagatcgttcgcacagagaacgagtttgtgagtgtcatgaaagaagcgcaggccgatgttaaccgcatgtattggattgaactggttctggagaaagaagatgcaccgaaactgctgaagaagatggggaagctgtttgcagaacagaacaaa

SEQ ID NO: 340 - protein, 547 aa, Artificial Sequence
  Variant of branched-chain keto acid decarboxylase (kdcA) from Lactococcus lactis
MYTVGDYLLDRLHELGIEEIFGVPGDYNLQFLDQIISREDMKWIGNANELNASYMADGYARTKKAAAFLTTFGVGELSAINGLAGSYAENLPVVEIVGSPTSKVQNDGKFVHHTLADGDFKHFMKMHEPVTAARTLLTAENATYEIDRVLSQLLKERKPVYINLPVDVAAAKAEKPALSLEKESSTTNTTEQVILSKIEESLKNAQKPVVIAGHEVISFGLEKTVTQFVSKFKLPITTLNFGKSAVDESLPSFLGIYNGKLSEISLKNFVESADLILMLGAKLTDSSTGAFTHHLDENKMISLNIDEGIIFNKVVEDFDFRAVVSSLSELKGIEYEGQYIDKQYEEFIPSSAPLSQDRLWQAVESLTQSNETIVAEQGTSFFGASTIFLKSNSRFIGQPLWGSIGYTFPAALGSQIADKESRHLLFIGDGSLQLTVQELGLAIREKLNPICFIINNDGYTVEREIHGPTQSYNDIPMWNYSKLPETFGATEDRVVSKIVRTENEFVSVMKEAQADVNRMYWIELVLEKEDAPKLLKKMGKLFAEQNK

SEQ ID NO: 341 - DNA, 1641 bp, Artificial Sequence
  Variant of branched-chain keto acid decarboxylase (kdcA) from Lactococcus lactis
atgtacaccgttggcgactatctgctggaccgtctgcatgaactgggaattgaagaaatctttggcgtgccgggcgattacaatctgcaattcctggatcaaatcattgcgcgcgaagatatgaaatggattggtaacgcgaatgaactgaatgcgagctacatggctgatggctatgcacgtacgaagaaggcggcggcgttcctgacgaccttcggtgttggtgaactgagcgcaatcaatgggttggcgggcagctatgcagagaacctgccagtcgtggaaatcgttgggagtccgacctcgaaggtgcagaacgatggcaagttcgttcatcacaccctggccgacggcgacttcaagcacttcatgaagatgcacgaaccggtcaccgctgcacgtacactgctgaccgccgagaacgcgaccacagagattgaccgcgtgctgagccaactgctgaaagaacgtaaacctgtgtacatcaacctgccggttgatgtcgccgcggcgaaagccgagaaaccagctctgagcctggagaaagaaagcagcacgaccaacaccacagaacaggtgatcctgtcgaagatcgaagaaagcctgaagaacgcccagaaaccggtcgtgatcgctgggcacgaggtgattagcttcggtctggagaagacggttacgcagtttattagtgaaaccaacctgccgattactaccctgaactttggcaaatcggctgtggatgaatccctgccgtccttcctgggtatctacaatggtaaactgagcgagattagcctcaagaactttgtggaaagcgcagacttcatcctgatgcttggtgtgaaactgacggatagcagtacgggcgcgtttacgcaccatctggacgagaacaagatgattagcctgaacattgatgaaggcatcatcttcaacaaagtcgtagaagacttcgatttgcgagcggttgttagcagcctgagcgagctgaaaggcattgaatacgaaggtcagtacattgataagcagtacgaagagttcattccgagcagcgcaccactgagccaagaccgtctgtggcaagcagtagaatctctgacacagtccaatgaaaccattgtggcggaacagggcacgtcgttcttcggtgcctccaccatccccctgaagagcaattcacgtttcatcggtcagccgctttggggcagcatcggctatacgtttccggcagcactgggatcacagattgcggataaggaaagtcgccatctgctgttcattggtgatggtagcctgcaactgaccgtgcaggagctgggcctgtcgatccgtgagaaactgaacccgatttgtttcatcatcaacaacgatggctataccgtagagcgcgagattcatgggcctacacagagctacaatgacatcccgatgtggaactatagcaaactgccggaaacctttggcgcgacggaagatcgcgtagttagcaagatcgttcgcacagagaacgagtttgtgagtgtcatgaaagaagcgcaggccgatgttaaccgcatgtattggattgaactggttctggagaaagaagatgcaccgaaactgctgaagaagatggggaagctgtttgcagaacagaacaaa

SEQ ID NO: 342 - protein, 547 aa, Artificial Sequence
  Variant of branched-chain keto acid decarboxylase (kdcA) from Lactococcus lactis
MYTVGDYLLDRLHELGIEEIFGVPGDYNLQFLDQIIAREDMKWIGNANELNASYMADGYARTKKAAAFLTTFGVGELSAINGLAGSYAENLPVVEIVGSPTSKVQNDGKFVHHTLADGDFKHFMKMHEPVTAARTLLTAENATTEIDRVLSQLLKERKPVYINLPVDVAAAKAEKPALSLEKESSTTNTTEQVILSKIEESLKNAQKPVVIAGHEVISFGLEKTVTQFISETNLPITTLNFGKSAVDESLPSFLGIYNGKLSEISLKNFVESADFILMLGVKLTDSSTGAFTHHLDENKMISLNIDEGIIFNKVVEDFDLRAVVSSLSELKGIEYEGQYIDKQYEEFIPSSAPLSQDRLWQAVESLTQSNETIVAEQGTSFFGASTIPLKSNSRFIGQPLWGSIGYTFPAALGSQIADKESRHLLFIGDGSLQLTVQELGLSIREKLNPICFIINNDGYTVEREIHGPTQSYNDIPMWNYSKLPETFGATEDRVVSKIVRTENEFVSVMKEAQADVNRMYWIELVLEKEDAPKLLKKMGKLFAEQNK

SEQ ID NO: 343 - DNA, 1641 bp, Artificial Sequence
  Variant of branched-chain keto acid decarboxylase (kdcA) from Lactococcus lactis
atgtacaccgttggcgactatctgctggaccgtctgcatgaactgggaattgaagaaatctttggcgtgccgggcgattacaatctgcaattcctggatcaaatcattgcgcgcgaagatatgaaatggattggtaacgcgaatgaactgaatgcgagctacatggctgatggctatgcacgtacgaagaaggcggcggcgttcctgacgaccttcggtgttggtgaactgagcgcaatcaatgggttggcgggcagctatgcagagaacctgccagtcgtggaaatcgttgggagtccgacctcgaaggtgcagaacgatggcaagttcgttcatcacaccctggccgacggcgacttcaagcacttcatgaagatgcacgaaccggtcaccgctgcacgtacactgctgaccgccgagaacgcgacctacgagattgaccgcgtgctgagccaactgctgaaagaacgtaaacctgtgtacatcaacctgccggttgatgtcgccgcggcgaaagccgagaaaccagctctgagcctggagaaagaaagcagcacgaccaacaccacagaacaggtgatcctgtcgaagatcgaagaaagcctgaagaacgcccagaaaccggtcgtgatcgctgggcacgaggtgattagcttcggtctggagaagacggttacgcagtttgtgagtgaaaccaaactgccgattactaccctgaactttggcaaatcggctgtggatgaatccctgccgtccttcctgggtatctacaatggtaaactgagcgagattagcctcaagaactttgtggaaagcgcagacttcatcctgatgcttggtgtgaaactgacggatagcagtacgggcgcgtttacgcaccatctggacgagaacaagatgattagcctgaacattgatgaaggcatcatcttcaacaaagtcgtagaagacttcgatttccgtgcggttgttagcagcctgagcgagctgaaaggcattgaatacgaaggtcagtacattgataagcagtacgaagagttcattccgagcagcgcaccactgagccaagaccgtctgtggcaagcagtagaatctctgacacagtccaatgaaaccattgtggcggaacagggcacgtcgttcttcggtgcctccaccatccccctgaagagcaattcacgtttcatcggtcagccgctttggggcagcatcggctatacgtttccggcagcactgggatcacagattgcggataaggaaagtcgccatctgctgttcattggtgatggtagcctgcaactgaccgtgcaggagctgggcctgtcgatccgtgagaaactgaacccgatttgtttcatcatcaacaacgatggctataccgtagagcgcgagattcatgggcctacacagagctacaatgacatcccgatgtggaactatagcaaactgccggaaacctttggcgcgacggaagatcgcgtagttagcaagatcgttcgcacagagaacgagtttgtgagtgtcatgaaagaagcgcaggccgatgttaaccgcatgtattggattgaactggttctggagaaagaagatgcaccgaaactgctgaagaagatggggaagctgtttgcagaacagaacaaa

SEQ ID NO: 344 - protein, 547 aa, Artificial Sequence
  Variant of branched-chain keto acid decarboxylase (kdcA) from Lactococcus lactis
MYTVGDYLLDRLHELGIEEIFGVPGDYNLQFLDQIIAREDMKWIGNANELNASYMADGYARTKKAAAFLTTFGVGELSAINGLAGSYAENLPVVEIVGSPTSKVQNDGKFVHHTLADGDFKHFMKMHEPVTAARTLLTAENATYEIDRVLSQLLKERKPVYINLPVDVAAAKAEKPALSLEKESSTTNTTEQVILSKIEESLKNAQKPVVIAGHEVISFGLEKTVTQFVSETKLPITTLNFGKSAVDESLPSFLGIYNGKLSEISLKNFVESADFILMLGVKLTDSSTGAFTHHLDENKMISLNIDEGIIFNKVVEDFDFRAVVSSLSELKGIEYEGQYIDKQYEEFIPSSAPLSQDRLWQAVESLTQSNETIVAEQGTSFFGASTIPLKSNSRFIGQPLWGSIGYTFPAALGSQIADKESRHLLFIGDGSLQLTVQELGLSIREKLNPICFIINNDGYTVEREIHGPTQSYNDIPMWNYSKLPETFGATEDRVVSKIVRTENEFVSVMKEAQADVNRMYWIELVLEKEDAPKLLKKMGKLFAEQNK

SEQ ID NO: 345 - DNA, 1641 bp, Artificial Sequence
  Variant of branched-chain keto acid decarboxylase (kdcA) from Lactococcus lactis
atgtacaccgttggcgactatctgctggaccgtctgcatgaactgggaattgaagaaatctttggcgtgccgggcgattacaatctgcaattcctggatcaaatcatttcgcgcgaagatatgaaatggattggtaacgcgaatgaactgaatgcgagctacatggctgatggctatgcacgtacgaagaaggcggcggcgttcctgacgaccttcggtgttggtgaactgagcgcaatcaatgggttggcgggcagctatgcagagaacctgccagtcgtggaaatcgttgggagtccgacctcgaaggtgcagaacgatggcaagttcgttcatcacaccctggccgacggcgacttcaagcacttcatgaagatgcacgaaccggtcaccgctgcacgtacactgctgaccgccgagaacgcgaccacagagattgaccgcgtgctgagccaactgctgaaagaacgtaaacctgtgtacatcaacctgccggttgatgtcgccgcggcgaaagccgagaaaccagctctgagcctggagaaagaaagcagcacgaccaacaccacagaacaggtgatcctgtcgaagatcgaagaaagcctgaagaacgcccagaaaccggtcgtgatcgctgggcacgaggtgattagcttcggtctggagaagacggttacgcagtttgttagtgaaaccaacctgccgattactaccctgaactttggcaaatcggctgtggatgaatccctgccgtccttcctgggtatctacaatggtaaactgagcgagattagcctcaagaactttgtggaaagcgcagacttcatcctgatgcttggtgtgaaactgacggatagcagtacgggcgcgtttacgcaccatctggacgagaacaagatgattagcctgaacattgatgaaggcatcatcttcaacaaagtcgtagaagacttcgattttcgagcggttgttagcagcctgagcgagctgaaaggcattgaatacgaaggtcagtacattgataagcagtacgaagagttcattccgagcagcgcaccactgagccaagaccgtctgtggcaagcagtagaatctctgacacagtccaatgaaaccattgtggcggaacagggcacgtcgttcttcggtgcctccaccatccccctgaagagcaattcacgtttcatcggtcagccgctttggggcagcatcggctatacgtttccggcagcactgggatcacagattgcggataaggaaagtcgccatctgctgttcattggtgatggtagcctgcaactgaccgtgcaggagctgggcctgtcgatccgtgagaaactgaacccgatttgtttcatcatcaacaacgatggctataccgtagagcgcgagattcatgggcctacacagagctacaatgacatcccgatgtggaactatagcaaactgccggaaacctttggcgcgacggaagatcgcgtagttagcaagatcgttcgcacagagaacgagtttgtgagtgtcatgaaagaagcgcaggccgatgttaaccgcatgtattggattgaactggttctggagaaagaagatgcaccgaaactgctgaagaagatggggaagctgtttgcagaacagaacaaa

SEQ ID NO: 346 - protein, 547 aa, Artificial Sequence
  Variant of branched-chain keto acid decarboxylase (kdcA) from Lactococcus lactis
MYTVGDYLLDRLHELGIEEIFGVPGDYNLQFLDQIISREDMKWIGNANELNASYMADGYARTKKAAAFLTTFGVGELSAINGLAGSYAENLPVVEIVGSPTSKVQNDGKFVHHTLADGDFKHFMKMHEPVTAARTLLTAENATTEIDRVLSQLLKERKPVYINLPVDVAAAKAEKPALSLEKESSTTNTTEQVILSKIEESLKNAQKPVVIAGHEVISFGLEKTVTQFVSETNLPITTLNFGKSAVDESLPSFLGIYNGKLSEISLKNFVESADFILMLGVKLTDSSTGAFTHHLDENKMISLNIDEGIIFNKVVEDFDFRAVVSSLSELKGIEYEGQYIDKQYEEFIPSSAPLSQDRLWQAVESLTQSNETIVAEQGTSFFGASTIPLKSNSRFIGQPLWGSIGYTFPAALGSQIADKESRHLLFIGDGSLQLTVQELGLSIREKLNPICFIINNDGYTVEREIHGPTQSYNDIPMWNYSKLPETFGATEDRVVSKIVRTENEFVSVMKEAQADVNRMYWIELVLEKEDAPKLLKKMGKLFAEQNK

SEQ ID NO: 347 - DNA, 1641 bp, Artificial Sequence
  Variant of branched-chain keto acid decarboxylase (kdcA) from Lactococcus lactis
atgtacaccgttggcgactatctgctggaccgtctgcatgaactgggaattgaagaaatctttggcgtgccgggcgattacaatctgcaattcctggatcaaatcattagccgcgaagatatgaaatggattggtaacgcgaatgaactgaatgcgagctacatggctgatggctatgcacgtacgaagaaggcggcggcgttcctgacgaccttcggtgttggtgaactgagcgcaatcaatgggttggcgggcagctatgcagagaacctgccagtcgtggaaatcgttgggagtccgacctcgaaggtgcagaacgatggcaagttcgttcatcacaccctggccgacggcgacttcaagcacttcatgaagatgcacgaaccggtcaccgctgcacgtacactgctgaccgccgagaacgcgacctatgagattgaccgcgtgctgagccaagcgctgaaagaacgtaaacctgtgtacatcaacctgccggttgatgtcgccgcggcgaaagccgagaaaccagctctgagcctggagaaagaaagcagcacgaccaacaccacagaacaggtgatcctgtcgaagatcgaagaaagcctgaagaacgcccagaaaccggtcgtgatcgctgggcacgaggtgattagcttcggtctggagaagacggttacgcagtttgtgagtgaaactaaactgccgattactaccctgaactttggcaaatcggctgtggatgaatccctgccgtcgttcctgggtatctacaatggtaaactgagcgaggagagcctcaagaactttgtggaaagcgcagacttgatcctgatgcttggtgtgaaactgacggatagcagtacgggcgcgtttacgcaccatctggacgagaacaagatgattagcctgaacattgatgaaggcatcatcttcaacaaagtcgtagaagacttcgatttccgtgcggttgttagcagcctgagcgagctgaaaggcattgaatacgaaggtcagtacattgataagcagtacgaagagttcattccgagcagcgcaccactgagccaagaccgtctgtggcaagcagtagaatctctgacacagtccaatgaaaccattgtggcggaacagggcacgtcgttcttcggtgcctccaccatcttcctgaagagcaattcacatttcatcggtcagccgctttggggcagcatcggctatacgtttccggcagcactgggatcacagattgcggataaggaaagtcgccatctgctgttcattggtgatggtagcctgcaactgaccgtgcaggagctgggcctggcgatccgtgagaaactgaacccgatttgtttcatcatcaacaacgatggctataccgtagagcgcgagattcatgggcctacacagagctacaatgacatcccgatgtggaactatagcaaactgccggaaacctttggcgcgacggaagatcgcgtagttagcaagatcgttcgcacagagaacgagtttgtgagtgtcatgaaagaagcgcaggccgatgttaaccgcatgtattggattgaactggttctggagaaagaagatgcaccgaaactgctgaagaagatggggaagctttttgcagaacagaacaaa

SEQ ID NO: 348 - protein, 547 aa, Artificial Sequence
  Variant of branched-chain keto acid decarboxylase (kdcA) from Lactococcus lactis
MYTVGDYLLDRLHELGIEEIFGVPGDYNLQFLDQIISREDMKWIGNANELNASYMADGYARTKKAAAFLTTFGVGELSAINGLAGSYAENLPVVEIVGSPTSKVQNDGKFVHHTLADGDFKHFMKMHEPVTAARTLLTAENATYEIDRVLSQALKERKPVYINLPVDVAAAKAEKPALSLEKESSTTNTTEQVILSKIEESLKNAQKPVVIAGHEVISFGLEKTVTQFVSETKLPITTLNFGKSAVDESLPSFLGIYNGKLSEESLKNFVESADLILMLGVKLTDSSTGAFTHHLDENKMISLNIDEGIIFNKVVEDFDFRAVVSSLSELKGIEYEGQYIDKQYEEFIPSSAPLSQDRLWQAVESLTQSNETIVAEQGTSFFGASTIFLKSNSHFIGQPLWGSIGYTFPAALGSQIADKESRHLLFIGDGSLQLTVQELGLAIREKLNPICFIINNDGYTVEREIHGPTQSYNDIPMWNYSKLPETFGATEDRVVSKIVRTENEFVSVMKEAQADVNRMYWIELVLEKEDAPKLLKKMGKLFAEQNK

SEQ ID NO: 349 - DNA, 1641 bp, Artificial Sequence
  Variant of branched-chain keto acid decarboxylase (kdcA) from Lactococcus lactis
atgtacaccgttggcgactatctgctggaccgtctgcatgaactgggaattgaagaaatctttggcgtgccgggcgattacaatctgcaattcctggatcaaatcattgcgcgcgaagatatgaaatggattggtaacgcgaatgaactgaatgcgagctacatggctgatggctatgcacgtacgaagaaggcggcggcgttcctgacgaccttcggtgttggtgaactgagcgcaatcaatgggttggcgggcagctatgcagagaacctgccagtcgtggaaatcgttgggagtccgacctcgaaggtgcagaacgatggcaagttcgttcatcacaccctggccgacggcgacttcaagcacttcatgaagatgcacgaaccggtcaccgctgcacgtacactgctgaccgccgagaacgcgacctacgagattgaccgcgtgctgagccaactgctgaaagaacgtaaacctgtgtacatcaacctgccggttgatgtcgccgcggcgaaagccgagaaaccagctctgagcctggagaaagaaagcagcacgaccaacaccacagaacaggtgatcctgtcgaagatcgaagaaagcctgaagaacgcccagaaaccggtcgtgatcgctgggcacgaggtgattagcttcggtctggagaagacggttacgcagtttgttagtgaaaccaaactgccgattactaccctgaactttggcaaatcggctgtggatgaatccctgccgtccttcctgggtatctacaatggtaaactgagcgagattagcctcaagaactttgtggaaagcgcagacttcatcctgatgcttggtgtgaaactgacggatagcagtacgggcgcgtttacgcaccatctggacgagaacaagatgattagcctgaacattgatgaaggcatcatcttcaacaaagtcgtagaagacttcgattttcgagcggttgttagcagcctgagcgagctgaaaggcattgaatacgaaggtcagtacattgataagcagtacgaagagttcattccgagcagcgcaccactgagccaagaccgtctgtggcaagcagtagaatctctgacacagtccaatgaaaccattgtggcggaacagggcacgtcgttcttcggtgcctccaccatcttcctgaagagcaattcacgtttcatcggtcagccgctttggggcagcatcggctatacgtttccggcagcactgggatcacagattgcggataaggaaagtcgccatctgctgttcattggtgatggtagcctgcaactgaccgtgcaggagctgggcctgtcgatccgtgagaaactgaacccgatttgtttcatcatcaacaacgatggctataccgtagagcgcgagattcatgggcctacacagagctacaatgacatcccgatgtggaactatagcaaactgccggaaacctttggcgcgacggaagatcgcgtagttagcaagatcgttcgcacagagaacgagtttgtgagtgtcatgaaagaagcgcaggccgatgttaaccgcatgtattggattgaactggttctggagaaagaagatgcaccgaaactgctgaagaagatggggaagctgtttgcagaacagaacaaa

SEQ ID NO: 350 - protein, 547 aa, Artificial Sequence; identical to SEQ ID NO: 12
  Variant of branched-chain keto acid decarboxylase (kdcA) from Lactococcus lactis

SEQ ID NO: 351 - DNA, 1641 bp, Artificial Sequence
  Variant of branched-chain keto acid decarboxylase (kdcA) from Lactococcus lactis
atgtacaccgttggcgactatctgctggaccgtctgcatgaactgggaattgaagaaatctttggcgtgccgggcgattacaatctgcaattcctggatcaaatcattagccgcgaagatatgaaatggattggtaacgcgaatgaactgaatgcgagctacatggctgatggctatgcacgtacgaagaaggcggcggcgttcctgacgaccttcggtgttggtgaactgagcgcaatcaatgggttggcgggcagctatgcagagaacctgccagtcgtggaaatcgttgggagtccgacctcgaaggtgcagaacgatggcaagttcgttcatcacaccctggccgacggcgacttcaagcacttcatgaagatgcacgaaccggtcaccgctgcacgtacactgctgaccgccgagaacgcgacctatgagattgaccgcgtgctgagccaactcctgaaagaacgtaaacctgtgtacatcaacctgccggttgatgtcgccgcggcgaaagccgagaaaccagctctgagcctggagaaagaaagcagcacgaccaacaccacagaacaggtgatcctgtcgaagatcgaagaaagcctgaagaacgcccagaaaccggtcgtgatcgctgggcacgaggtgattagcttcggtctggagaagacggttacgcagtttgtgagtgaaactaaactgccgattactaccctgaactttggcaaatcggctgtggatgaatccgacccgtcgttcctgggtatctacaatggtaaactgagcgagattagcctcaagaactttgtggaaagcgcagacttcatcctgatgcttggtgtgaaactgacggatagcagtacgggcgcgtttacgcaccatctggacgagaacaagatgattagcctgaacattgatgaaggcatcatcttcaacaaagtcgtagaagacttcgatttccgtgcggttgttagcagcctgagcgagctgaaaggcattgaatacgaaggtcagtacattgataagcagtacgaagagttcattccgagcagcgcaccactgagccaagaccgtctgtggcaagcagtagaatctctgacacagtccaatgaaaccattgtggcggaacagggcacgtcgttcttcggtgcctccaccatcttcctgaagagcaattcacgcttcatcggtcagccgctttggggcagcatcggctatacgtttccggcagcactgggatcacagattgcggataaggaaagtcgccatctgctgttcattggtgatggtagcctgcaactgaccgtgcaggagctgggcctgtcgatccgtgagaaactgaacccgatttgtttcatcatcaacaacgatggctataccgtagagcgcgagattcatgggcctacacagagctacaatgacatcccgatgtggaactatagcaaactgccggaaacctttggcgcgacggaagatcgcgtagttagcaagatcgttcgcacagagaacgagtttgtgagtgtcatgaaagaagcgcaggccgatgttaaccgcatgtattggattgaactggttctggagaaagaagatgcaccgaaactgctgaagaagatggggaagctttttgcagaacagaacaaa

SEQ ID NO: 352 - protein, 547 aa, Artificial Sequence
  Variant of branched-chain keto acid decarboxylase (kdcA) from Lactococcus lactis
MYTVGDYLLDRLHELGIEEIFGVPGDYNLQFLDQIISREDMKWIGNANELNASYMADGYARTKKAAAFLTTFGVGELSAINGLAGSYAENLPVVEIVGSPTSKVQNDGKFVHHTLADGDFKHFMKMHEPVTAARTLLTAENATYEIDRVLSQLLKERKPVYINLPVDVAAAKAEKPALSLEKESSTTNTTEQVILSKIEESLKNAQKPVVIAGHEVISFGLEKTVTQFVSETKLPITTLNFGKSAVDESDPSFLGIYNGKLSEISLKNFVESADFILMLGVKLTDSSTGAFTHHLDENKMISLNIDEGIIFNKVVEDFDFRAVVSSLSELKGIEYEGQYIDKQYEEFIPSSAPLSQDRLWQAVESLTQSNETIVAEQGTSFFGASTIFLKSNSRFIGQPLWGSIGYTFPAALGSQIADKESRHLLFIGDGSLQLTVQELGLSIREKLNPICFIINNDGYTVEREIHGPTQSYNDIPMWNYSKLPETFGATEDRVVSKIVRTENEFVSVMKEAQADVNRMYWIELVLEKEDAPKLLKKMGKLFAEQNK

SEQ ID NO: 353 - DNA, 1641 bp, Artificial Sequence
  Variant of branched-chain keto acid decarboxylase (kdcA) from Lactococcus lactis
atgtacaccgttggcgactatctgctggaccgtctgcatgaactgggaattgaagaaatctttggcgtgccgggcgattacaatctgcaattcctggatcaaatcattagccgcgaagatatgaaatggattggtaacgcgaatgaactgaatgcgagctacatggctgatggctatgcacgtacgaagaaggcggcggcgttcctgacgaccttcggtgttggtgaactgagcgcaatcaatgggttggcgggcagctatgcagagaacctgccagtcgtggaaatcgttgggagtccgacctcgaaggtgcagaacgatggcaagttcgttcatcacaccctggccgacggcgacttcaagcacttcatgaagatgcacgaaccggtcaccgctgcacgtacactgctgaccgccgagaacgcgaccacagagattgaccgcgtgctgagccaactgctgaaagaacgtaaacctgtgtacatcaacctgccggttgatgtcgccgcggcgaaagccgagaaaccagctctgagcctggagaaagaaagcagcacgaccaacaccacagaacaggtgatcctgtcgaagatcgaagaaagcctgaagaacgcccagaaaccggtcgtgatcgctgggcacgaggtgattagcttcggtctggagaagacggttacgcagtttgtgagtgaaaccaaactgccgattactaccctgaactttggcaaatcggctgtggatgaatccctgccgtccttcctgggtatctacaatggtaaactgagcgagattagcctcaagaactttgtggaaagcgcagacttcatcctgatgcttggtgtgaaactgacggatagcagtacgggcgcgtttacgcaccatctggacgagaacaagatgattagcctgaacattgatgaaggcatcatcttcaacaaagtcgtagaagacttcgatttccgtgcggttgttagcagcctgagcgagctgaaaggcattgaatacgaaggtcagtacattgataagcagtacgaagagttcattccgagcagcgcaccactgagccaagaccgtctgtggcaagcagtagaatctctgacacagtccaatgaaaccattgtggcggaacagggcacgtcgttcttcggtgcctccaccatcttcctgaagagcaattcacgcttcatcggtcagccgctttggggcagcatcggctatacgtttccggcagcactgggatcacagattgcggataaggaaagtcgccatctgctgttcattggtgatggtagcctgcaactgaccgtgcaggagctgggcctgtcgatccgtgagaaactgaacccgatttgtttcatcatcaacaacgatggctataccgtagagcgcgagattcatgggcctacacagagctacaatgacatcccgatgtggaactatagcaaactgccggaaacctttggcgcgacggaagatcgcgtagttagcaagatcgttcgcacagagaacgagtttgtgagtgtcatgaaagaagcgcaggccgatgttaaccgcatgtattggattgaactggttctggagaaagaagatgcaccgaaactgctgaagaagatggggaagctgtttgcagaacagaacaaa

SEQ ID NO: 354 - protein, 547 aa, Artificial Sequence
  Variant of branched-chain keto acid decarboxylase (kdcA) from Lactococcus lactis
MYTVGDYLLDRLHELGIEEIFGVPGDYNLQFLDQIISREDMKWIGNANELNASYMADGYARTKKAAAFLTTFGVGELSAINGLAGSYAENLPVVEIVGSPTSKVQNDGKFVHHTLADGDFKHFMKMHEPVTAARTLLTAENATTEIDRVLSQLLKERKPVYINLPVDVAAAKAEKPALSLEKESSTTNTTEQVILSKIEESLKNAQKPVVIAGHEVISFGLEKTVTQFVSETKLPITTLNFGKSAVDESLPSFLGIYNGKLSEISLKNFVESADFILMLGVKLTDSSTGAFTHHLDENKMISLNIDEGIIFNKVVEDFDFRAVVSSLSELKGIEYEGQYIDKQYEEFIPSSAPLSQDRLWQAVESLTQSNETIVAEQGTSFFGASTIFLKSNSRFIGQPLWGSIGYTFPAALGSQIADKESRHLLFIGDGSLQLTVQELGLSIREKLNPICFIINNDGYTVEREIHGPTQSYNDIPMWNYSKLPETFGATEDRVVSKIVRTENEFVSVMKEAQADVNRMYWIELVLEKEDAPKLLKKMGKLFAEQNK

SEQ ID NO: 355 - DNA, 1641 bp, Artificial Sequence
  Variant of branched-chain keto acid decarboxylase (kdcA) from Lactococcus lactis
atgtacaccgttggcgactatctgctggaccgtctgcatgaactgggaattgaagaaatctttggcgtgccgggcgattacaatctgcaattcctggatcaaatcattagccgcgaagatatgaaatggattggtaacgcgaatgaactgaatgcgagctacatggctgatggctatgcacgtacgaagaaggcggcggcgttcctgacgaccttcggtgttggtgaactgagcgcaatcaatgggttggcgggcagctatgcagagaacctgccagtcgtggaaatcgttgggagtccgacctcgaaggtgcagaacgatggcaagttcgttcatcacaccctggccgacggcgacttcaagcacttcatgaagatgcacgaaccggtcaccgctgcacgtacactgctgaccgccgagaacgcgacctatgagattgaccgcgtgctgagccaactgctgaaagaacgtaaacctgtgtacatcaacctgccggttgatgtcgccgcggcgaaagccgagaaaccagctctgagcctggagaaagaaagcagcacgaccaacaccacagaacaggtgatcctgtcgaagatcgaagaaagcctgaagaacgcccagaaaccggtcgtgatcgctgggcacgaggtgattagcttcggtctggagaagacggttacgcagtttgtgagtgaaaccaaactgccgattactaccctgaactttggcaaatcggctgtggatgaatccctgccgtccttcctgggtatctacaatggtaaactgagcgagattagcctcaagaactttgtggaaagcgcagacttcatcctgatgcttggtgtgaaactgacggatagcagtacgggcgcgtttacgcaccatctggacgagaacaagatgattagcctgaacattgatgaaggcatcatcttcaacaaagtcgtagaagacttcgatttccgtgcggttgttagcagcctgagcgagctgaaaggcattgaatacgaaggtcagtacattgataagcagtacgaagagttcattccgagcagcgcaccactgagccaagaccgtctgtggcaagcagtagaatctctgacacagtccaatgaaaccattgtggcggaacagggcacgtcgttcttcggtgcctccaccatcttcctgaagagcaattcacgcttcatcggtcagccgctttggggcagcatcggctatacgtttccggcagcactgggatcacagattgcggataaggaaagtcgccatctgctgttcattggtgatggtagcctgcaactgaccgtgcaggagctgggcacgtcgatccgtgagaaactgaacccgatttgtttcatcatcaacaacgatggctataccgtagagcgcgagattcatgggcctacacagagctacaatgacatcccgatgtggaactatagcaaactgccggaaacctttggcgcgacggaagatcgcgtagttagcaagatcgttcgcacagagaacgagtttgtgagtgtcatgaaagaagcgcaggccgatgttaaccgcatgtattggattgaactggttctggagaaagaagatgcaccgaaactgctgaagaagatggggaagctgtttgcagaacagaacaaa

SEQ ID NO: 356 - protein, 547 aa, Artificial Sequence
  Variant of branched-chain keto acid decarboxylase (kdcA) from Lactococcus lactis
MYTVGDYLLDRLHELGIEEIFGVPGDYNLQFLDQIISREDMKWIGNANELNASYMADGYARTKKAAAFLTTFGVGELSAINGLAGSYAENLPVVEIVGSPTSKVQNDGKFVHHTLADGDFKHFMKMHEPVTAARTLLTAENATYEIDRVLSQLLKERKPVYINLPVDVAAAKAEKPALSLEKESSTTNTTEQVILSKIEESLKNAQKPVVIAGHEVISFGLEKTVTQFVSETKLPITTLNFGKSAVDESLPSFLGIYNGKLSEISLKNFVESADFILMLGVKLTDSSTGAFTHHLDENKMISLNIDEGIIFNKVVEDFDFRAVVSSLSELKGIEYEGQYIDKQYEEFIPSSAPLSQDRLWQAVESLTQSNETIVAEQGTSFFGASTIFLKSNSRFIGQPLWGSIGYTFPAALGSQIADKESRHLLFIGDGSLQLTVQELGTSIREKLNPICFIINNDGYTVEREIHGPTQSYNDIPMWNYSKLPETFGATEDRVVSKIVRTENEFVSVMKEAQADVNRMYWIELVLEKEDAPKLLKKMGKLFAEQNK

SEQ ID NO: 357 - DNA, 1641 bp, Artificial Sequence
  Variant of branched-chain keto acid decarboxylase (kdcA) from Lactococcus lactis
atgtacaccgttggcgactatctgctggaccgtctgcatgaactgggaattgaagaaatctttggcgtgccgggcgattacaatctgcaattcctggatcaaatcattagccgcgaagatatgaaatggattggtaacgcgaatgaactgaatgcgagctacatggctgatggctatgcacgtacgaagaaggcggcggcgttcctgacgaccttcggtgttggtgaactgagcgcaatcaatgggttggcgggcagctatgcagagaacctgccagtcgtggaaatcgttgggagtccgacctcgaaggtgcagaacgatggcaagttcgttcatcacaccctggccgacggcgacttcaagcacttcatgaagatgcacgaaccggtcaccgctgcacgtacactgctgaccgccgagaacgcgacctatgagattgaccgcgtgctgagccaactgctgaaagaacgtaaacctgtgtacatcaacctgccggttgatgtcgccgcggcgaaagccgagaaaccagctctgagcctggagaaagaaagcagcacgaccaacaccacagaacaggtgatcctgtcgaagatcgaagaaagcctgaagaacgcccagaaaccggtcgtgatcgctgggcacgaggtgattagcttcggtctggagaagacggttacgcagtttgtgagtgaaaccaaactgccgattactaccctgaactttggcaaatcggctgtggatgaatccctgccgcacttcctgggtatctacaatggtaaactgagcgagattagcctcaagaactttgtggaaagcgcagacttcatcctgatgcttggtgtgaaactgacggatagcagtacgggcgcgtttacgcaccatctggacgagaacaagatgattagcctgaacattgatgaaggcatcatcttcaacaaagtcgtagaagacttcgatttccgtgcggttgttagcagcctgagcgagctgaaaggcattgaatacgaaggtcagtacattgataagcagtacgaagagttcattccgagcagcgcaccactgagccaagaccgtctgtggcaagcagtagaatctctgacacagtccaatgaaaccattgtggcggaacagggcacgtcgttcttcggtgcctccaccatcttcctgaagagcaattcacgcttcatcggtcagccgctttggggcagcatcggctatacgtttccggcagcactgggatcacagattgcggataaggaaagtcgccatctgctgttcattggtgatggtagcctgcaactgaccgtgcaggagctgggcctgtcgatccgtgagaaactgaacccgatttgtttcatcatcaacaacgatggctataccgtagagcgcgagattcatgggcctacacagagctacaatgacatcccgatgtggaactatagcaaactgccggaaacctttggcgcgacggaagatcgcgtagttagcaagatcgttcgcacagagaacgagtttgtgagtgtcatgaaagaagcgcaggccgatgttaaccgcatgtattggattgaactggttctggagaaagaagatgcaccgaaactgctgaagaagatggggaagctttttgcagaacagaacaaa

SEQ ID NO: 358 - protein, 547 aa, Artificial Sequence
  Variant of branched-chain keto acid decarboxylase (kdcA) from Lactococcus lactis
MYTVGDYLLDRLHELGIEEIFGVPGDYNLQFLDQIISREDMKWIGNANELNASYMADGYARTKKAAAFLTTFGVGELSAINGLAGSYAENLPVVEIVGSPTSKVQNDGKFVHHTLADGDFKHFMKMHEPVTAARTLLTAENATYEIDRVLSQLLKERKPVYINLPVDVAAAKAEKPALSLEKESSTTNTTEQVILSKIEESLKNAQKPVVIAGHEVISFGLEKTVTQFVSETKLPITTLNFGKSAVDESLPHFLGIYNGKLSEISLKNFVESADFILMLGVKLTDSSTGAFTHHLDENKMISLNIDEGIIFNKVVEDFDFRAVVSSLSELKGIEYEGQYIDKQYEEFIPSSAPLSQDRLWQAVESLTQSNETIVAEQGTSFFGASTIFLKSNSRFIGQPLWGSIGYTFPAALGSQIADKESRHLLFIGDGSLQLTVQELGLSIREKLNPICFIINNDGYTVEREIHGPTQSYNDIPMWNYSKLPETFGATEDRVVSKIVRTENEFVSVMKEAQADVNRMYWIELVLEKEDAPKLLKKMGKLFAEQNK

SEQ ID NO: 359 - DNA, 1641 bp, Artificial Sequence
  Variant of branched-chain keto acid decarboxylase (kdcA) from Lactococcus lactis
atgtacaccgttggcgactatctgctggaccgtctgcatgaactgggaattgaagaaatctttggcgtgccgggcgattacaatctgcaattcctggatcaaatcattagccgcgaagatatgaaatggattggtaacgcgaatgaactgaatgcgagctacatggctgatggctatgcacgtacgaagaaggcggcggcgttcctgacgaccttcggtgttggtgaactgagcgcaatcaatgggttggcgggcagctatgcagagaacctgccagtcgtggaaatcgttgggagtccgacctcgaaggtgcagaacgatggcaagttcgttcatcacaccctggccgacggcgacttcaagcacttcatgaagatgcacgaaccggtcaccgctgcacgtacactgctgaccgccgagaacgcgacctatgagattgaccgcgtgctgagccaactgctgaaagaacgtaaacctgtgtacatcaacctgccggttgatgtcgccgcggcgaaagccgagaaaccagctctgagcctggagaaagaaagcagcacgaccaacaccacagaacaggtgatcctgtcgaagatcgaagaaagcctgaagaacgcccagaaaccggtcgtgatcgctgggcacgaggtgattagcttcggtctggagaagacggttacgcagtttgtgagtgaaaccaaactgccgattactaccctgaactttggcaaatcggctgtggatgaatccctgccgtccttcctgggtacctacaatggtaaactgagcgagattagcctcaagaactttgtggaaagcgcagacttcatcctgatgcttggtgtgaaactgacggatagcagtacgggcgcgtttacgcaccatctggacgagaacaagatgattagcctgaacattgatgaaggcatcatcttcaacaaagtcgtagaagacttcgatttccgtgcggttgttagcagcctgagcgagctgaaaggcattgaatacgaaggtcagtacattgataagcagtacgaagagttcattccgagcagcgcaccactgagccaagaccgtctgtggcaagcagtagaatctctgacacagtccaatgaaaccattgtggcggaacagggcacgtcgttcttcggtgcctccaccatcttcctgaagagcaattcacgtttcatcggtcagccgctttggggcagcatcggctatacgtttccggcagcactgggatcacagattgcggataaggaaagtcgccatctgctgttcattggtgatggtagcctgcaactgaccgtgcaggagctgggcctgtcgatccgtgagaaactgaacccgatttgtttcatcatcaacaacgatggctataccgtagagcgcgagattcatgggcctacacagagctacaatgacatcccgatgtggaactatagcaaactgccggaaacctttggcgcgacggaagatcgcgtagttagcaagatcgttcgcacagagaacgagtttgtgagtgtcatgaaagaagcgcaggccgatgttaaccgcatgtattggattgaactggttctggagaaagaagatgcaccgaaactgctgaagaagatggggaagctgtttgcagaacagaacaaa

SEQ ID NO: 360 - protein, 547 aa, Artificial Sequence
  Variant of branched-chain keto acid decarboxylase (kdcA) from Lactococcus lactis
MYTVGDYLLDRLHELGIEEIFGVPGDYNLQFLDQIISREDMKWIGNANELNASYMADGYARTKKAAAFLTTFGVGELSAINGLAGSYAENLPVVEIVGSPTSKVQNDGKFVHHTLADGDFKHFMKMHEPVTAARTLLTAENATYEIDRVLSQLLKERKPVYINLPVDVAAAKAEKPALSLEKESSTTNTTEQVILSKIEESLKNAQKPVVIAGHEVISFGLEKTVTQFVSETKLPITTLNFGKSAVDESLPSFLGTYNGKLSEISLKNFVESADFILMLGVKLTDSSTGAFTHHLDENKMISLNIDEGIIFNKVVEDFDFRAVVSSLSELKGIEYEGQYIDKQYEEFIPSSAPLSQDRLWQAVESLTQSNETIVAEQGTSFFGASTIFLKSNSRFIGQPLWGSIGYTFPAALGSQIADKESRHLLFIGDGSLQLTVQELGLSIREKLNPICFIINNDGYTVEREIHGPTQSYNDIPMWNYSKLPETFGATEDRVVSKIVRTENEFVSVMKEAQADVNRMYWIELVLEKEDAPKLLKKMGKLFAEQNK

SEQ ID NO: 361 - DNA, 1641 bp, Artificial Sequence
  Variant of branched-chain keto acid decarboxylase (kdcA) from Lactococcus lactis
atgtacaccgttggcgactatctgctggaccgtctgcatgaactgggaattgaagaaatctttggcgtgccgggcgattacaatctgcaattcctggatcaaatcattagccgcgaagatatgaaatggattggtaacgcgaatgaactgaatgcgagctacatggctgatggctatgcacgtacgaagaaggcggcggcgttcctgacgaccttcggtgttggtgaactgagcgcaatcaatgggttggcgggcagctatgcagagaacctgccagtcgtggaaatcgttgggagtccgacctcgaaggtgcagaacgatggcaagttcgttcatcacaccctggccgacggcgacttcaagcacttcatgaagatgcacgaaccggtcaccgctgcacgtacactgctgaccgccgagaacgcgacctatgagattgaccgcgtgctgagccaactgctgaaagaacgtaaacctgtgtacatcaacctgccggttgatgtcgccgcggcgaaagccgagaaaccagctctgagcctggagaaagaaagcagcacgaccaacaccacagaacaggtgatcctgtcgaagatcgaagaaagcctgaagaacgcccagaaaccggtcgtgatcgctgggcacgaggtgattagcttcggtctggagaagacggttacgcagtttgtgagtgaaaccaaactgccgattactaccctgaactttggcaaatcggctgtggatgaatccctgccgtccttcctgggtatctacaatggtaaactgagcgagattagcctcaagaactttgtggaaagcgcagacttcatcctgatgcttggtgtgaaactgacggatagcagtacgggcgcgtttacgcaccatctggacgagaacaagatgattagcctgaacattgatgaaggcatcatcttcaacaaagtcgtagaagacttcgatttccgtgcggttgttagcagcctgagcgagctgaaaggcattgaatacgaaggtcagtacattgataagcagtacgaagagttcattccgagcagcgcaccactgagccaagaccgtctgtggcaagcagtagaatctctgacacagtccaatgaaaccattgtggcggaacagggcacgtcgttcttcggtgcctccaccatcttcctgaagagcaattcacgcttcatcggtcagccgctttggggcagcatcggctatacgtttccggcagcactgggatcacagattgcggataaggaaagtcgccatctgctgttcattggtgatggtagcctgcaactgaccgtgcaggagctgggcctgtcgatccgtgagaaactgaacccgatttgtttcatcatcaacaacgatggctataccgtagagcgcgagattcatgggcctacacagagctacaatgacatcccgatgtggaactatagcaaactgccggaaacctttggcgcgacggaagatcgcgtagttagcaagatcgttcgcacagagaacgagtttgtgagtgtcatgaaagaagcgcaggccgatgttaaccgcatgtattggattgaactggttctggagaaagaagatgcaccgaaactgctgaagaagatggggaagatttttgcagaacagaacaaa

SEQ ID NO: 362 - protein, 547 aa, Artificial Sequence
  Variant of branched-chain keto acid decarboxylase (kdcA) from Lactococcus lactis
MYTVGDYLLDRLHELGIEEIFGVPGDYNLQFLDQIISREDMKWIGNANELNASYMADGYARTKKAAAFLTTFGVGELSAINGLAGSYAENLPVVEIVGSPTSKVQNDGKFVHHTLADGDFKHFMKMHEPVTAARTLLTAENATYEIDRVLSQLLKERKPVYINLPVDVAAAKAEKPALSLEKESSTTNTTEQVILSKIEESLKNAQKPVVIAGHEVISFGLEKTVTQFVSETKLPITTLNFGKSAVDESLPSFLGIYNGKLSEISLKNFVESADFILMLGVKLTDSSTGAFTHHLDENKMISLNIDEGIIFNKVVEDFDFRAVVSSLSELKGIEYEGQYIDKQYEEFIPSSAPLSQDRLWQAVESLTQSNETIVAEQGTSFFGASTIFLKSNSRFIGQPLWGSIGYTFPAALGSQIADKESRHLLFIGDGSLQLTVQELGLSIREKLNPICFIINNDGYTVEREIHGPTQSYNDIPMWNYSKLPETFGATEDRVVSKIVRTENEFVSVMKEAQADVNRMYWIELVLEKEDAPKLLKKMGKIFAEQNK

SEQ ID NO: 363 - DNA, 1641 bp, Artificial Sequence
  Variant of branched-chain keto acid decarboxylase (kdcA) from Lactococcus lactis
atgtacaccgttggcgactatctgctggaccgtctgcatgaactgggaattgaagaaatctttggcgtgccgggcgattacaatctgcaattcctggatcaaatcattgatcgcgaagatatgaaatggattggtaacgcgaatgaactgaatgcgagctacatggctgatggctatgcacgtacgaagaaggcggcggcgttcctgacgaccttcggtgttggtgaactgagcgcaatcaatgggttggcgggcagctatgcagagaacctgccagtcgtggaaatcgttgggagtccgacctcgaaggtgcagaacgatggcaagttcgttcatcacaccctggccgacggcgacttcaagcacttcatgaagatgcacgaaccggtcaccgctgcacgtacactgctgaccgccgagaacgcgacctatgagattgaccgcgtgctgagccaactgctgaaagaacgtaaacctgtgtacatcaacctgccggttgatgtcgccgcggcgaaagccgagaaaccagctctgagcctggagaaagaaagcagcacgaccaacaccacagaacaggtgatcctgtcgaagatcgaagaaagcctgaagaacgcccagaaaccggtcgtgatcgctgggcacgaggtgattagcttcggtctggagaagacggttacgcagtttgtgagtgaaaccaaactgccgattactaccctgaactttggcaaatcggctgtggatgaatccctgccgtccttcctgggtatctacaatggtaaactgagcgagattagcctcaagaactttgtggaaagcgcagacttcatcctgatgcttggtgtgaaactgacggatagcagtacgggcgcgtttacgcaccatctggacgagaacaagatgattagcctgaacattgatgaaggcatcatcttcaacaaagtcgtagaagacttcgatttccgtgcggttgttagcagcctgagcgagctgaaaggcattgaatacgaaggtcagtacattgataagcagtacgaagagttcattccgagcagcgcaccactgagccaagaccgtctgtggcaagcagtagaatctctgacacagtccaatgaaaccattgtggcggaacagggcacgtcgttcttcggtgcctccaccatcttcctgaagagcaattcacgcttcatcggtcagccgctttggggcagcatcggctatacgtttccggcagcactgggatcacagattgcggataaggaaagtcgccatctgctgttcattggtgatggtagcctgcaactgaccgtgcaggagctgggcctgtcgatccgtgagaaactgaacccgatttgtttcatcatcaacaacgatggctataccgtagagcgcgagattcatgggcctacacagagctacaatgacatcccgatgtggaactatagcaaactgccggaaacctttggcgcgacggaagatcgcgtagttagcaagatcgttcgcacagagaacgagtttgtgagtgtcatgaaagaagcgcaggccgatgttaaccgcatgtattggattgaactggttctggagaaagaagatgcaccgaaactgctgaagaagatggggaagctgtttgcagaacagaacaaa

SEQ ID NO: 364 - protein, 547 aa, Artificial Sequence
  Variant of branched-chain keto acid decarboxylase (kdcA) from Lactococcus lactis
MYTVGDYLLDRLHELGIEEIFGVPGDYNLQFLDQIIDREDMKWIGNANELNASYMADGYARTKKAAAFLTTFGVGELSAINGLAGSYAENLPVVEIVGSPTSKVQNDGKFVHHTLADGDFKHFMKMHEPVTAARTLLTAENATYEIDRVLSQLLKERKPVYINLPVDVAAAKAEKPALSLEKESSTTNTTEQVILSKIEESLKNAQKPVVIAGHEVISFGLEKTVTQFVSETKLPITTLNFGKSAVDESLPSFLGIYNGKLSEISLKNFVESADFILMLGVKLTDSSTGAFTHHLDENKMISLNIDEGIIFNKVVEDFDFRAVVSSLSELKGIEYEGQYIDKQYEEFIPSSAPLSQDRLWQAVESLTQSNETIVAEQGTSFFGASTIFLKSNSRFIGQPLWGSIGYTFPAALGSQIADKESRHLLFIGDGSLQLTVQELGLSIREKLNPICFIINNDGYTVEREIHGPTQSYNDIPMWNYSKLPETFGATEDRVVSKIVRTENEFVSVMKEAQADVNRMYWIELVLEKEDAPKLLKKMGKLFAEQNK

SEQ ID NO: 365 - DNA, 1641 bp, Artificial Sequence
  Variant of branched-chain keto acid decarboxylase (kdcA) from Lactococcus lactis
atgtacaccgttggcgactatctgctggaccgtctgcatgaactgggaattgaagaaatctttggcgtgccgggcgattacaatctgcaattcctggatcaaatcattagccatgaagatatgaaatggattggtaacgcgaatgaactgaatgcgagctacatggctgatggctatgcacgtacgaagaaggcggcggcgttcctgacgaccttcggtgttggtgaactgagcgcaatcaatgggttggcgggcagctatgcagagaacctgccagtcgtggaaatcgttgggagtccgacctcgaaggtgcagaacgatggcaagttcgttcatcacaccctggccgacggcgacttcaagcacttcatgaagatgcacgaaccggtcaccgctgcacgtacactgctgaccgccgagaacgcgacctatgagattgaccgcgtgctgagccaactgctgaaagaacgtaaacctgtgtacatcaacctgccggttgatgtcgccgcggcgaaagccgagaaaccagctctgagcctggagaaagaaagcagcacgaccaacaccacagaacaggtgatcctgtcgaagatcgaagaaagcctgaagaacgcccagaaaccggtcgtgatcgctgggcacgaggtgattagcttcggtctggagaagacggttacgcagtttgtgagtgaaaccaaactgccgattactaccctgaactttggcaaatcggctgtggatgaatccctgccgtccttcctgggtatctacaatggtaaactgagcgagattagcctcaagaactttgtggaaagcgcagacttcatcctgatgcttggtgtgaaactgacggatagcagtacgggcgcgtttacgcaccatctggacgagaacaagatgattagcctgaacattgatgaaggcatcatcttcaacaaagtcgtagaagacttcgatttccgtgcggttgttagcagcctgagcgagctgaaaggcattgaatacgaaggtcagtacattgataagcagtacgaagagttcattccgagcagcgcaccactgagccaagaccgtctgtggcaagcagtagaatctctgacacagtccaatgaaaccattgtggcggaacagggcacgtcgttcttcggtgcctccaccatcttcctgaagagcaattcacgcttcatcggtcagccgctttggggcagcatcggctatacgtttccggcagcactgggatcacagattgcggataaggaaagtcgccatctgctgttcattggtgatggtagcctgcaactgaccgtgcaggagctgggcctgtcgatccgtgagaaactgaacccgatttgtttcatcatcaacaacgatggctataccgtagagcgcgagattcatgggcctacacagagctacaatgacatcccgatgtggaactatagcaaactgccggaaacctttggcgcgacggaagatcgcgtagttagcaagatcgttcgcacagagaacgagtttgtgagtgtcatgaaagaagcgcaggccgatgttaaccgcatgtattggattgaactggttctggagaaagaagatgcaccgaaactgctgaagaagatggggaagctgtttgcagaacagaacaaa

SEQ ID NO: 366 - protein, 547 aa, Artificial Sequence
  Variant of branched-chain keto acid decarboxylase (kdcA) from Lactococcus lactis
MYTVGDYLLDRLHELGIEEIFGVPGDYNLQFLDQIISHEDMKWIGNANELNASYMADGYARTKKAAAFLTTFGVGELSAINGLAGSYAENLPVVEIVGSPTSKVQNDGKFVHHTLADGDFKHFMKMHEPVTAARTLLTAENATYEIDRVLSQLLKERKPVYINLPVDVAAAKAEKPALSLEKESSTTNTTEQVILSKIEESLKNAQKPVVIAGHEVISFGLEKTVTQFVSETKLPITTLNFGKSAVDESLPSFLGIYNGKLSEISLKNFVESADFILMLGVKLTDSSTGAFTHHLDENKMISLNIDEGIIFNKVVEDFDFRAVVSSLSELKGIEYEGQYIDKQYEEFIPSSAPLSQDRLWQAVESLTQSNETIVAEQGTSFFGASTIFLKSNSRFIGQPLWGSIGYTFPAALGSQIADKESRHLLFIGDGSLQLTVQELGLSIREKLNPICFIINNDGYTVEREIHGPTQSYNDIPMWNYSKLPETFGATEDRVVSKIVRTENEFVSVMKEAQADVNRMYWIELVLEKEDAPKLLKKMGKLFAEQNK

SEQ ID NO: 367 - DNA, 1641 bp, Artificial Sequence
  Variant of branched-chain keto acid decarboxylase (kdcA) from Lactococcus lactis
atgtacaccgttggcgactatctgctggaccgtctgcatgaactgggaattgaagaaatctttggcgtgccgggcgattacaatctgcaattcctggatcaaatcattagcagtgaagatatgaaatggattggtaacgcgaatgaactgaatgcgagctacatggctgatggctatgcacgtacgaagaaggcggcggcgttcctgacgaccttcggtgttggtgaactgagcgcaatcaatgggttggcgggcagctatgcagagaacctgccagtcgtggaaatcgttgggagtccgacctcgaaggtgcagaacgatggcaagttcgttcatcacaccctggccgacggcgacttcaagcacttcatgaagatgcacgaaccggtcaccgctgcacgtacactgctgaccgccgagaacgcgacctatgagattgaccgcgtgctgagccaactgctgaaagaacgtaaacctgtgtacatcaacctgccggttgatgtcgccgcggcgaaagccgagaaaccagctctgagcctggagaaagaaagcagcacgaccaacaccacagaacaggtgatcctgtcgaagatcgaagaaagcctgaagaacgcccagaaaccggtcgtgatcgctgggcacgaggtgattagcttcggtctggagaagacggttacgcagtttgtgagtgaaaccaaactgccgattactaccctgaactttggcaaatcggctgtggatgaatccctgccgtccttcctgggtatctacaatggtaaactgagcgagattagcctcaagaactttgtggaaagcgcagacttcatcctgatgcttggtgtgaaactgacggatagcagtacgggcgcgtttacgcaccatctggacgagaacaagatgattagcctgaacattgatgaaggcatcatcttcaacaaagtcgtagaagacttcgatttccgtgcggttgttagcagcctgagcgagctgaaaggcattgaatacgaaggtcagtacattgataagcagtacgaagagttcattccgagcagcgcaccactgagccaagaccgtctgtggcaagcagtagaatctctgacacagtccaatgaaaccattgtggcggaacagggcacgtcgttcttcggtgcctccaccatcttcctgaagagcaattcacgcttcatcggtcagccgctttggggcagcatcggctatacgtttccggcagcactgggatcacagattgcggataaggaaagtcgccatctgctgttcattggtgatggtagcctgcaactgaccgtgcaggagctgggcctgtcgatccgtgagaaactgaacccgatttgtttcatcatcaacaacgatggctataccgtagagcgcgagattcatgggcctacacagagctacaatgacatcccgatgtggaactatagcaaactgccggaaacctttggcgcgacggaagatcgcgtagttagcaagatcgttcgcacagagaacgagtttgtgagtgtcatgaaagaagcgcaggccgatgttaaccgcatgtattggattgaactggttctggagaaagaagatgcaccgaaactgctgaagaagatggggaagctgtttgcagaacagaacaaa

SEQ ID NO: 368 - protein, 547 aa, Artificial Sequence
  Variant of branched-chain keto acid decarboxylase (kdcA) from Lactococcus lactis
MYTVGDYLLDRLHELGIEEIFGVPGDYNLQFLDQIISSEDMKWIGNANELNASYMADGYARTKKAAAFLTTFGVGELSAINGLAGSYAENLPVVEIVGSPTSKVQNDGKFVHHTLADGDFKHFMKMHEPVTAARTLLTAENATYEIDRVLSQLLKERKPVYINLPVDVAAAKAEKPALSLEKESSTTNTTEQVILSKIEESLKNAQKPVVIAGHEVISFGLEKTVTQFVSETKLPITTLNFGKSAVDESLPSFLGIYNGKLSEISLKNFVESADFILMLGVKLTDSSTGAFTHHLDENKMISLNIDEGIIFNKVVEDFDFRAVVSSLSELKGIEYEGQYIDKQYEEFIPSSAPLSQDRLWQAVESLTQSNETIVAEQGTSFFGASTIFLKSNSRFIGQPLWGSIGYTFPAALGSQIADKESRHLLFIGDGSLQLTVQELGLSIREKLNPICFIINNDGYTVEREIHGPTQSYNDIPMWNYSKLPETFGATEDRVVSKIVRTENEFVSVMKEAQADVNRMYWIELVLEKEDAPKLLKKMGKLFAEQNK

SEQ ID NO: 369 - DNA, 1641 bp, Artificial Sequence
  Variant of branched-chain keto acid decarboxylase (kdcA) from Lactococcus lactis
atgtacaccgttggcgactatctgctggaccgtctgcatgaactgggaattgaagaaatctttggcgtgccgggcgattacaatctgcaattcctggatcaaatcattggtcgcgaagatatgaaatggattggtaacgcgaatgaactgaatgcgagctacatggctgatggctatgcacgtacgaagaaggcggcggcgttcctgacgaccttcggtgttggtgaactgagcgcaatcaatgggttggcgggcagctatgcagagaacctgccagtcgtggaaatcgttgggagtccgacctcgaaggtgcagaacgatggcaagttcgttcatcacaccctggccgacggcgacttcaagcacttcatgaagatgcacgaaccggtcaccgctgcacgtacactgctgaccgccgagaacgcgacctatgagattgaccgcgtgctgagccaactgctgaaagaacgtaaacctgtgtacatcaacctgccggttgatgtcgccgcggcgaaagccgagaaaccagctctgagcctggagaaagaaagcagcacgaccaacaccacagaacaggtgatcctgtcgaagatcgaagaaagcctgaagaacgcccagaaaccggtcgtgatcgctgggcacgaggtgattagcttcggtctggagaagacggttacgcagtttgtgagtgaaaccaaactgccgattactaccctgaactttggcaaatcggctgtggatgaatccctgccgtccttcctgggtatctacaatggtaaactgagcgagattagcctcaagaactttgtggaaagcgcagacttcatcctgatgcttggtgtgaaactgacggatagcagtacgggcgcgtttacgcaccatctggacgagaacaagatgattagcctgaacattgatgaaggcatcatcttcaacaaagtcgtagaagacttcgatttccgtgcggttgttagcagcctgagcgagctgaaaggcattgaatacgaaggtcagtacattgataagcagtacgaagagttcattccgagcagcgcaccactgagccaagaccgtctgtggcaagcagtagaatctctgacacagtccaatgaaaccattgtggcggaacagggcacgtcgttcttcggtgcctccaccatcttcctgaagagcaattcacgcttcatcggtcagccgctttggggcagcatcggctatacgtttccggcagcactgggatcacagattgcggataaggaaagtcgccatctgctgttcattggtgatggtagcctgcaactgaccgtgcaggagctgggcctgtcgatccgtgagaaactgaacccgatttgtttcatcatcaacaacgatggctataccgtagagcgcgagattcatgggcctacacagagctacaatgacatcccgatgtggaactatagcaaactgccggaaacctttggcgcgacggaagatcgcgtagttagcaagatcgttcgcacagagaacgagtttgtgagtgtcatgaaagaagcgcaggccgatgttaaccgcatgtattggattgaactggttctggagaaagaagatgcaccgaaactgctgaagaagatggggaagctgtttgcagaacagaacaaa

SEQ ID NO: 370 - protein, 547 aa, Artificial Sequence
  Variant of branched-chain keto acid decarboxylase (kdcA) from Lactococcus lactis
MYTVGDYLLDRLHELGIEEIFGVPGDYNLQFLDQIIGREDMKWIGNANELNASYMADGYARTKKAAAFLTTFGVGELSAINGLAGSYAENLPVVEIVGSPTSKVQNDGKFVHHTLADGDFKHFMKMHEPVTAARTLLTAENATYEIDRVLSQLLKERKPVYINLPVDVAAAKAEKPALSLEKESSTTNTTEQVILSKIEESLKNAQKPVVIAGHEVISFGLEKTVTQFVSETKLPITTLNFGKSAVDESLPSFLGIYNGKLSEISLKNFVESADFILMLGVKLTDSSTGAFTHHLDENKMISLNIDEGIIFNKVVEDFDFRAVVSSLSELKGIEYEGQYIDKQYEEFIPSSAPLSQDRLWQAVESLTQSNETIVAEQGTSFFGASTIFLKSNSRFIGQPLWGSIGYTFPAALGSQIADKESRHLLFIGDGSLQLTVQELGLSIREKLNPICFIINNDGYTVEREIHGPTQSYNDIPMWNYSKLPETFGATEDRVVSKIVRTENEFVSVMKEAQADVNRMYWIELVLEKEDAPKLLKKMGKLFAEQNK

SEQ ID NO: 371 - DNA, 1641 bp, Artificial Sequence
  Variant of branched-chain keto acid decarboxylase (kdcA) from Lactococcus lactis
atgtacaccgttggcgactatctgctggaccgtctgcatgaactgggaattgaagaaatctttggcgtgccgggcgattacaatctgcaattcctggatcaaatcattagccgcgaagatatgaaatggattggtaacgcgaatgaactgaatgcgagctacatggctgatggctatgcacgtacgaagaaggcggcggcgttcctgacgaccttcggtgttggtgaactgagcgcaatcaatgggttggcgggcagctatgcagagaacctgccagtcgtggaaatcgttgggagtccgacctcgaaggtgcagaacgatggcaagttcgttcatcacaccctggccgacggcgacttcaagcacttcaaaaagatgcacgaaccggtcaccgctgcacgtacactgctgaccgccgagaacgcgacctatgagattgaccgcgtgctgagccaactgctgaaagaacgtaaacctgtgtacatcaacctgccggttgatgtcgccgcggcgaaagccgagaaaccagctctgagcctggagaaagaaagcagcacgaccaacaccacagaacaggtgatcctgtcgaagatcgaagaaagcctgaagaacgcccagaaaccggtcgtgatcgctgggcacgaggtgattagcttcggtctggagaagacggttacgcagtttgtgagtgaaaccaaactgccgattactaccctgaactttggcaaatcggctgtggatgaatccctgccgtccttcctgggtatctacaatggtaaactgagcgagattagcctcaagaactttgtggaaagcgcagacttcatcctgatgcttggtgtgaaactgacggatagcagtacgggcgcgtttacgcaccatctggacgagaacaagatgattagcctgaacattgatgaaggcatcatcttcaacaaagtcgtagaagacttcgatttccgtgcggttgttagcagcctgagcgagctgaaaggcattgaatacgaaggtcagtacattgataagcagtacgaagagttcattccgagcagcgcaccactgagccaagaccgtctgtggcaagcagtagaatctctgacacagtccaatgaaaccattgtggcggaacagggcacgtcgttcttcggtgcctccaccatcttcctgaagagcaattcacgcttcatcggtcagccgctttggggcagcatcggctatacgtttccggcagcactgggatcacagattgcggataaggaaagtcgccatctgctgttcattggtgatggtagcctgcaactgaccgtgcaggagctgggcctgtcgatccgtgagaaactgaacccgatttgtttcatcatcaacaacgatggctataccgtagagcgcgagattcatgggcctacacagagctacaatgacatcccgatgtggaactatagcaaactgccggaaacctttggcgcgacggaagatcgcgtagttagcaagatcgttcgcacagagaacgagtttgtgagtgtcatgaaagaagcgcaggccgatgttaaccgcatgtattggattgaactggttctggagaaagaagatgcaccgaaactgctgaagaagatggggaagctgtttgcagaacagaacaaa

SEQ ID NO: 372 - protein, 547 aa, Artificial Sequence
  Variant of branched-chain keto acid decarboxylase (kdcA) from Lactococcus lactis
MYTVGDYLLDRLHELGIEEIFGVPGDYNLQFLDQIISREDMKWIGNANELNASYMADGYARTKKAAAFLTTFGVGELSAINGLAGSYAENLPVVEIVGSPTSKVQNDGKFVHHTLADGDFKHFKKMHEPVTAARTLLTAENATYEIDRVLSQLLKERKPVYINLPVDVAAAKAEKPALSLEKESSTTNTTEQVILSKIEESLKNAQKPVVIAGHEVISFGLEKTVTQFVSETKLPITTLNFGKSAVDESLPSFLGIYNGKLSEISLKNFVESADFILMLGVKLTDSSTGAFTHHLDENKMISLNIDEGIIFNKVVEDFDFRAVVSSLSELKGIEYEGQYIDKQYEEFIPSSAPLSQDRLWQAVESLTQSNETIVAEQGTSFFGASTIFLKSNSRFIGQPLWGSIGYTFPAALGSQIADKESRHLLFIGDGSLQLTVQELGLSIREKLNPICFIINNDGYTVEREIHGPTQSYNDIPMWNYSKLPETFGATEDRVVSKIVRTENEFVSVMKEAQADVNRMYWIELVLEKEDAPKLLKKMGKLFAEQNK

SEQ ID NO: 373 - DNA, 1641 bp, Artificial Sequence
  Variant of branched-chain keto acid decarboxylase (kdcA) from Lactococcus lactis
atgtacaccgttggcgactatctgctggaccgtctgcatgaactgggaattgaagaaatctttggcgtgccgggcgattacaatctgcaattcctggatcaaatcattagccgcgaagatatgaaatggattggtaacgcgaatgaactgaatgcgagctacatggctgatggctatgcacgtacgaagaaggcggcggcgttcctgacgaccttcggtgttggtgaactgagcgcaatcaatgggttggcgggcagctatgcagagaacctgccagtcgtggaaatcgttgggagtccgacctcgaaggtgcagaacgatggcaagttcgttcatcacaccctggccgacggcgacttcaagcacttcatgaagatgcacgaaccggtcaccgctgcacgtacactgctgaccgccgagaacgcgacctatgagattgaccgcgtgctgcaacaactgctgaaagaacgtaaacctgtgtacatcaacctgccggttgatgtcgccgcggcgaaagccgagaaaccagctctgagcctggagaaagaaagcagcacgaccaacaccacagaacaggtgatcctgtcgaagatcgaagaaagcctgaagaacgcccagaaaccggtcgtgatcgctgggcacgaggtgattagcttcggtctggagaagacggttacgcagtttgtgagtgaaaccaaactgccgattactaccctgaactttggcaaatcggctgtggatgaatccctgccgtccttcctgggtatctacaatggtaaactgagcgagattagcctcaagaactttgtggaaagcgcagacttcatcctgatgcttggtgtgaaactgacggatagcagtacgggcgcgtttacgcaccatctggacgagaacaagatgattagcctgaacattgatgaaggcatcatcttcaacaaagtcgtagaagacttcgatttccgtgcggttgttagcagcctgagcgagctgaaaggcattgaatacgaaggtcagtacattgataagcagtacgaagagttcattccgagcagcgcaccactgagccaagaccgtctgtggcaagcagtagaatctctgacacagtccaatgaaaccattgtggcggaacagggcacgtcgttcttcggtgcctccaccatcttcctgaagagcaattcacgcttcatcggtcagccgctttggggcagcatcggctatacgtttccggcagcactgggatcacagattgcggataaggaaagtcgccatctgctgttcattggtgatggtagcctgcaactgaccgtgcaggagctgggcctgtcgatccgtgagaaactgaacccgatttgtttcatcatcaacaacgatggctataccgtagagcgcgagattcatgggcctacacagagctacaatgacatcccgatgtggaactatagcaaactgccggaaacctttggcgcgacggaagatcgcgtagttagcaagatcgttcgcacagagaacgagtttgtgagtgtcatgaaagaagcgcaggccgatgttaaccgcatgtattggattgaactggttctggagaaagaagatgcaccgaaactgctgaagaagatggggaagctgtttgcagaacagaacaaa

SEQ ID NO: 374 - protein, 547 aa, Artificial Sequence
  Variant of branched-chain keto acid decarboxylase (kdcA) from Lactococcus lactis
MYTVGDYLLDRLHELGIEEIFGVPGDYNLQFLDQIISREDMKWIGNANELNASYMADGYARTKKAAAFLTTFGVGELSAINGLAGSYAENLPVVEIVGSPTSKVQNDGKFVHHTLADGDFKHFMKMHEPVTAARTLLTAENATYEIDRVLQQLLKERKPVYINLPVDVAAAKAEKPALSLEKESSTTNTTEQVILSKIEESLKNAQKPVVIAGHEVISFGLEKTVTQFVSETKLPITTLNFGKSAVDESLPSFLGIYNGKLSEISLKNFVESADFILMLGVKLTDSSTGAFTHHLDENKMISLNIDEGIIFNKVVEDFDFRAVVSSLSELKGIEYEGQYIDKQYEEFIPSSAPLSQDRLWQAVESLTQSNETIVAEQGTSFFGASTIFLKSNSRFIGQPLWGSIGYTFPAALGSQIADKESRHLLFIGDGSLQLTVQELGLSIREKLNPICFIINNDGYTVEREIHGPTQSYNDIPMWNYSKLPETFGATEDRVVSKIVRTENEFVSVMKEAQADVNRMYWIELVLEKEDAPKLLKKMGKLFAEQNK

SEQ ID NO: 375 - DNA, 1641 bp, Artificial Sequence
  Variant of branched-chain keto acid decarboxylase (kdcA) from Lactococcus lactis
atgtacaccgttggcgactatctgctggaccgtctgcatgaactgggaattgaagaaatctttggcgtgccgggcgattacaatctgcaattcctggatcaaatcattagccgcgaagatatgaaatggattggtaacgcgaatgaactgaatgcgagctacatggctgatggctatgcacgtacgaagaaggcggcggcgttcctgacgaccttcggtgttggtgaactgagcgcaatcaatgggttggcgggcagctatgcagagaacctgccagtcgtggaaatcgttgggagtccgacctcgaaggtgcagaacgatggcaagttcgttcatcacaccctggccgacggcgacttcaagcacttcatgaagatgcacgaaccggtcaccgctgcacgtacactgctgaccgccgagaacgcgacccgtgagattgaccgcgtgctgagccaactgctgaaagaacgtaaacctgtgtacatcaacctgccggttgatgtcgccgcggcgaaagccgagaaaccagctctgagcctggagaaagaaagcagcacgaccaacaccacagaacaggtgatcctgtcgaagatcgaagaaagcctgaagaacgcccagaaaccggtcgtgatcgctgggcacgaggtgattagcttcggtctggagaagacggttacgcagtttgtgagtgaaaccaaactgccgattactaccctgaactttggcaaatcggctgtggatgaatccctgccgtccttcctgggtatctacaatggtaaactgagcgagattagcctcaagaactttgtggaaagcgcagacttcatcctgatgcttggtgtgaaactgacggatagcagtacgggcgcgtttacgcaccatctggacgagaacaagatgattagcctgaacattgatgaaggcatcatcttcaacaaagtcgtagaagacttcgatttccgtgcggttgttagcagcctgagcgagctgaaaggcattgaatacgaaggtcagtacattgataagcagtacgaagagttcattccgagcagcgcaccactgagccaagaccgtctgtggcaagcagtagaatctctgacacagtccaatgaaaccattgtggcggaacagggcacgtcgttcttcggtgcctccaccatcttcctgaagagcaattcacgcttcatcggtcagccgctttggggcagcatcggctatacgtttccggcagcactgggatcacagattgcggataaggaaagtcgccatctgctgttcattggtgatggtagcctgcaactgaccgtgcaggagctgggcctgtcgatccgtgagaaactgaacccgatttgtttcatcatcaacaacgatggctataccgtagagcgcgagattcatgggcctacacagagctacaatgacatcccgatgtggaactatagcaaactgccggaaacctttggcgcgacggaagatcgcgtagttagcaagatcgttcgcacagagaacgagtttgtgagtgtcatgaaagaagcgcaggccgatgttaaccgcatgtattggattgaactggttctggagaaagaagatgcaccgaaactgctgaagaagatggggaagctgtttgcagaacagaacaaa

SEQ ID NO: 376 - protein, 547 aa, Artificial Sequence
  Variant of branched-chain keto acid decarboxylase (kdcA) from Lactococcus lactis
MYTVGDYLLDRLHELGIEEIFGVPGDYNLQFLDQIISREDMKWIGNANELNASYMADGYARTKKAAAFLTTFGVGELSAINGLAGSYAENLPVVEIVGSPTSKVQNDGKFVHHTLADGDFKHFMKMHEPVTAARTLLTAENATREIDRVLSQLLKERKPVYINLPVDVAAAKAEKPALSLEKESSTTNTTEQVILSKIEESLKNAQKPVVIAGHEVISFGLEKTVTQFVSETKLPITTLNFGKSAVDESLPSFLGIYNGKLSEISLKNFVESADFILMLGVKLTDSSTGAFTHHLDENKMISLNIDEGIIFNKVVEDFDFRAVVSSLSELKGIEYEGQYIDKQYEEFIPSSAPLSQDRLWQAVESLTQSNETIVAEQGTSFFGASTIFLKSNSRFIGQPLWGSIGYTFPAALGSQIADKESRHLLFIGDGSLQLTVQELGLSIREKLNPICFIINNDGYTVEREIHGPTQSYNDIPMWNYSKLPETFGATEDRVVSKIVRTENEFVSVMKEAQADVNRMYWIELVLEKEDAPKLLKKMGKLFAEQNK

SEQ ID NO: 377 - DNA, 1641 bp, Artificial Sequence
  Variant of branched-chain keto acid decarboxylase (kdcA) from Lactococcus lactis
atgtacaccgttggcgactatctgctggaccgtctgcatgaactgggaattgaagaaatctttggcgtgccgggcgattacaatctgcaattcctggatcaaatcattagccgcgaagatatgaaatggattggtaacgcgaatgaactgaatgcgagctacatggctgatggctatgcacgtacgaagaaggcggcggcgttcctgacgaccttcggtgttggtgaactgagcgcaatcaatgggttggcgggcagctatgcagagaacctgccagtcgtggaaatcgttgggagtccgacctcgaaggtgcagaacgatggcaagttcgttcatcacaccctggccgacggcgacttcaagcacttcatgaagatgcacgaaccggtcaccgctgcacgtacactgctgaccgccgagaacgcgacctatgagattgaccgcgtgctgaaacaactgctgaaagaacgtaaacctgtgtacatcaacctgccggttgatgtcgccgcggcgaaagccgagaaaccagctctgagcctggagaaagaaagcagcacgaccaacaccacagaacaggtgatcctgtcgaagatcgaagaaagcctgaagaacgcccagaaaccggtcgtgatcgctgggcacgaggtgattagcttcggtctggagaagacggttacgcagtttgtgagtgaaaccaaactgccgattactaccctgaactttggcaaatcggctgtggatgaatccctgccgtccttcctgggtatctacaatggtaaactgagcgagattagcctcaagaactttgtggaaagcgcagacttcatcctgatgcttggtgtgaaactgacggatagcagtacgggcgcgtttacgcaccatctggacgagaacaagatgattagcctgaacattgatgaaggcatcatcttcaacaaagtcgtagaagacttcgatttccgtgcggttgttagcagcctgagcgagctgaaaggcattgaatacgaaggtcagtacattgataagcagtacgaagagttcattccgagcagcgcaccactgagccaagaccgtctgtggcaagcagtagaatctctgacacagtccaatgaaaccattgtggcggaacagggcacgtcgttcttcggtgcctccaccatcttcctgaagagcaattcacgcttcatcggtcagccgctttggggcagcatcggctatacgtttccggcagcactgggatcacagattgcggataaggaaagtcgccatctgctgttcattggtgatggtagcctgcaactgaccgtgcaggagctgggcctgtcgatccgtgagaaactgaacccgatttgtttcatcatcaacaacgatggctataccgtagagcgcgagattcatgggcctacacagagctacaatgacatcccgatgtggaactatagcaaactgccggaaacctttggcgcgacggaagatcgcgtagttagcaagatcgttcgcacagagaacgagtttgtgagtgtcatgaaagaagcgcaggccgatgttaaccgcatgtattggattgaactggttctggagaaagaagatgcaccgaaactgctgaagaagatggggaagctgtttgcagaacagaacaaa

SEQ ID NO: 378 - protein, 547 aa, Artificial Sequence
  Variant of branched-chain keto acid decarboxylase (kdcA) from Lactococcus lactis
MYTVGDYLLDRLHELGIEEIFGVPGDYNLQFLDQIISREDMKWIGNANELNASYMADGYARTKKAAAFLTTFGVGELSAINGLAGSYAENLPVVEIVGSPTSKVQNDGKFVHHTLADGDFKHFMKMHEPVTAARTLLTAENATYEIDRVLKQLLKERKPVYINLPVDVAAAKAEKPALSLEKESSTTNTTEQVILSKIEESLKNAQKPVVIAGHEVISFGLEKTVTQFVSETKLPITTLNFGKSAVDESLPSFLGIYNGKLSEISLKNFVESADFILMLGVKLTDSSTGAFTHHLDENKMISLNIDEGIIFNKVVEDFDFRAVVSSLSELKGIEYEGQYIDKQYEEFIPSSAPLSQDRLWQAVESLTQSNETIVAEQGTSFFGASTIFLKSNSRFIGQPLWGSIGYTFPAALGSQIADKESRHLLFIGDGSLQLTVQELGLSIREKLNPICFIINNDGYTVEREIHGPTQSYNDIPMWNYSKLPETFGATEDRVVSKIVRTENEFVSVMKEAQADVNRMYWIELVLEKEDAPKLLKKMGKLFAEQNK

SEQ ID NO: 379 - DNA, 1641 bp, Artificial Sequence
  Variant of branched-chain keto acid decarboxylase (kdcA) from Lactococcus lactis
atgtacaccgttggcgactatctgctggaccgtctgcatgaactgggaattgaagaaatctttggcgtgccgggcgattacaatctgcaattcctggatcaaatcattagccgcgaagatatgaaatggattggtaacgcgaatgaactgaatgcgagctacatggctgatggctatgcacgtacgaagaaggcggcggcgttcctgacgaccttcggtgttggtgaactgagcgcaatcaatgggttggcgggcagctatgcagagaacctgccagtcgtggaaatcgttgggagtccgacctcgaaggtgcagaacgatggcaagttcgttcatcacaccctggccgacggcgacttcaagcacttcatgaagatgcacgaaccggtcaccgctgcacgtacactgctgaccgccgagaacgcgacctatgagattgaccgcgtgctgtggcaactgctgaaagaacgtaaacctgtgtacatcaacctgccggttgatgtcgccgcggcgaaagccgagaaaccagctctgagcctggagaaagaaagcagcacgaccaacaccacagaacaggtgatcctgtcgaagatcgaagaaagcctgaagaacgcccagaaaccggtcgtgatcgctgggcacgaggtgattagcttcggtctggagaagacggttacgcagtttgtgagtgaaaccaaactgccgattactaccctgaactttggcaaatcggctgtggatgaatccctgccgtccttcctgggtatctacaatggtaaactgagcgagattagcctcaagaactttgtggaaagcgcagacttcatcctgatgcttggtgtgaaactgacggatagcagtacgggcgcgtttacgcaccatctggacgagaacaagatgattagcctgaacattgatgaaggcatcatcttcaacaaagtcgtagaagacttcgatttccgtgcggttgttagcagcctgagcgagctgaaaggcattgaatacgaaggtcagtacattgataagcagtacgaagagttcattccgagcagcgcaccactgagccaagaccgtctgtggcaagcagtagaatctctgacacagtccaatgaaaccattgtggcggaacagggcacgtcgttcttcggtgcctccaccatcttcctgaagagcaattcacgcttcatcggtcagccgctttggggcagcatcggctatacgtttccggcagcactgggatcacagattgcggataaggaaagtcgccatctgctgttcattggtgatggtagcctgcaactgaccgtgcaggagctgggcctgtcgatccgtgagaaactgaacccgatttgtttcatcatcaacaacgatggctataccgtagagcgcgagattcatgggcctacacagagctacaatgacatcccgatgtggaactatagcaaactgccggaaacctttggcgcgacggaagatcgcgtagttagcaagatcgttcgcacagagaacgagtttgtgagtgtcatgaaagaagcgcaggccgatgttaaccgcatgtattggattgaactggttctggagaaagaagatgcaccgaaactgctgaagaagatggggaagctgtttgcagaacagaacaaa

SEQ ID NO: 380 - protein, 547 aa, Artificial Sequence
  Variant of branched-chain keto acid decarboxylase (kdcA) from Lactococcus lactis
MYTVGDYLLDRLHELGIEEIFGVPGDYNLQFLDQIISREDMKWIGNANELNASYMADGYARTKKAAAFLTTFGVGELSAINGLAGSYAENLPVVEIVGSPTSKVQNDGKFVHHTLADGDFKHFMKMHEPVTAARTLLTAENATYEIDRVLWQLLKERKPVYINLPVDVAAAKAEKPALSLEKESSTTNTTEQVILSKIEESLKNAQKPVVIAGHEVISFGLEKTVTQFVSETKLPITTLNFGKSAVDESLPSFLGIYNGKLSEISLKNFVESADFILMLGVKLTDSSTGAFTHHLDENKMISLNIDEGIIFNKVVEDFDFRAVVSSLSELKGIEYEGQYIDKQYEEFIPSSAPLSQDRLWQAVESLTQSNETIVAEQGTSFFGASTIFLKSNSRFIGQPLWGSIGYTFPAALGSQIADKESRHLLFIGDGSLQLTVQELGLSIREKLNPICFIINNDGYTVEREIHGPTQSYNDIPMWNYSKLPETFGATEDRVVSKIVRTENEFVSVMKEAQADVNRMYWIELVLEKEDAPKLLKKMGKLFAEQNK

SEQ ID NO: 381 - DNA, 1641 bp, Artificial Sequence
  Variant of branched-chain keto acid decarboxylase (kdcA) from Lactococcus lactis
atgtacaccgttggcgactatctgctggaccgtctgcatgaactgggaattgaagaaatctttggcgtgccgggcgattacaatctgcaattcctggatcaaatcattagccgcgaagatatgaaatggattggtaacgcgaatgaactgaatgcgagctacatggctgatggctatgcacgtacgaagaaggcggcggcgttcctgacgaccttcggtgttggtgaactgagcgcaatcaatgggttggcgggcagctatgcagagaacctgccagtcgtggaaatcgttgggagtccgacctcgaaggtgcagaacgatggcaagttcgttcatcacaccctggccgacggcgacttcaagcacttcatgaagatgcacgaaccggtcaccgctgcacgtacactgctgaccgccgagaacgcgacctatgagattgaccgcgtgctgagccaactgctgaaagaacgtaaacctgtgtacatcaacctgccggttgatgtcgccgcggcgaaagccgagaaaccagctctgagcctggagaaagaaagcagcacgaccaacaccacagaacaggtgatcctgtcgaagatcgaagaaagcctgaagaacgcccagaaaccggtcgtgatcgctgggcacgaggtgattagcttcggtctggagaagacggttacgcagtttttgagtgaaaccaaactgccgattactaccctgaactttggcaaatcggctgtggatgaatccctgccgtccttcctgggtatctacaatggtaaactgagcgagattagcctcaagaactttgtggaaagcgcagacttcatcctgatgcttggtgtgaaactgacggatagcagtacgggcgcgtttacgcaccatctggacgagaacaagatgattagcctgaacattgatgaaggcatcatcttcaacaaagtcgtagaagacttcgatttccgtgcggttgttagcagcctgagcgagctgaaaggcattgaatacgaaggtcagtacattgataagcagtacgaagagttcattccgagcagcgcaccactgagccaagaccgtctgtggcaagcagtagaatctctgacacagtccaatgaaaccattgtggcggaacagggcacgtcgttcttcggtgcctccaccatcttcctgaagagcaattcacgcttcatcggtcagccgctttggggcagcatcggctatacgtttccggcagcactgggatcacagattgcggataaggaaagtcgccatctgctgttcattggtgatggtagcctgcaactgaccgtgcaggagctgggcctgtcgatccgtgagaaactgaacccgatttgtttcatcatcaacaacgatggctataccgtagagcgcgagattcatgggcctacacagagctacaatgacatcccgatgtggaactatagcaaactgccggaaacctttggcgcgacggaagatcgcgtagttagcaagatcgttcgcacagagaacgagtttgtgagtgtcatgaaagaagcgcaggccgatgttaaccgcatgtattggattgaactggttctggagaaagaagatgcaccgaaactgctgaagaagatggggaagctgtttgcagaacagaacaaa

SEQ ID NO: 382 - protein, 547 aa, Artificial Sequence
  Variant of branched-chain keto acid decarboxylase (kdcA) from Lactococcus lactis
MYTVGDYLLDRLHELGIEEIFGVPGDYNLQFLDQIISREDMKWIGNANELNASYMADGYARTKKAAAFLTTFGVGELSAINGLAGSYAENLPVVEIVGSPTSKVQNDGKFVHHTLADGDFKHFMKMHEPVTAARTLLTAENATYEIDRVLSQLLKERKPVYINLPVDVAAAKAEKPALSLEKESSTTNTTEQVILSKIEESLKNAQKPVVIAGHEVISFGLEKTVTQFLSETKLPITTLNFGKSAVDESLPSFLGIYNGKLSEISLKNFVESADFILMLGVKLTDSSTGAFTHHLDENKMISLNIDEGIIFNKVVEDFDFRAVVSSLSELKGIEYEGQYIDKQYEEFIPSSAPLSQDRLWQAVESLTQSNETIVAEQGTSFFGASTIFLKSNSRFIGQPLWGSIGYTFPAALGSQIADKESRHLLFIGDGSLQLTVQELGLSIREKLNPICFIINNDGYTVEREIHGPTQSYNDIPMWNYSKLPETFGATEDRVVSKIVRTENEFVSVMKEAQADVNRMYWIELVLEKEDAPKLLKKMGKLFAEQNK

SEQ ID NO: 383 - DNA, 1641 bp, Artificial Sequence
  Variant of branched-chain keto acid decarboxylase (kdcA) from Lactococcus lactis
atgtacaccgttggcgactatctgctggaccgtctgcatgaactgggaattgaagaaatctttggcgtgccgggcgattacaatctgcaattcctggatcaaatcattagccgcgaagatatgaaatggattggtaacgcgaatgaactgaatgcgagctacatggctgatggctatgcacgtacgaagaaggcggcggcgttcctgacgaccttcggtgttggtgaactgagcgcaatcaatgggttggcgggcagctatgcagagaacctgccagtcgtggaaatcgttgggagtccgacctcgaaggtgcagaacgatggcaagttcgttcatcacaccctggccgacggcgacttcaagcacttcatgaagatgcacgaaccggtcaccgctgcacgtacactgctgaccgccgagaacgcgacctatgagattgaccgcgtgctgagccaactgctgaaagaacgtaaacctgtgtacatcaacctgccggttgatgtcgccgcggcgaaagccgagaaaccagctctgagcctggagaaagaaagcagcacgaccaacaccacagaacaggtgatcctgtcgaagatcgaagaaagcctgaagaacgcccagaaaccggtcgtgatcgctgggcacgaggtgattagcttcggtctggagaagacggttacgcagtttgtgagtgaaaccttgctgccgattactaccctgaactttggcaaatcggctgtggatgaatccctgccgtccttcctgggtatctacaatggtaaactgagcgagattagcctcaagaactttgtggaaagcgcagacttcatcctgatgcttggtgtgaaactgacggatagcagtacgggcgcgtttacgcaccatctggacgagaacaagatgattagcctgaacattgatgaaggcatcatcttcaacaaagtcgtagaagacttcgatttccgtgcggttgttagcagcctgagcgagctgaaaggcattgaatacgaaggtcagtacattgataagcagtacgaagagttcattccgagcagcgcaccactgagccaagaccgtctgtggcaagcagtagaatctctgacacagtccaatgaaaccattgtggcggaacagggcacgtcgttcttcggtgcctccaccatcttcctgaagagcaattcacgcttcatcggtcagccgctttggggcagcatcggctatacgtttccggcagcactgggatcacagattgcggataaggaaagtcgccatctgctgttcattggtgatggtagcctgcaactgaccgtgcaggagctgggcctgtcgatccgtgagaaactgaacccgatttgtttcatcatcaacaacgatggctataccgtagagcgcgagattcatgggcctacacagagctacaatgacatcccgatgtggaactatagcaaactgccggaaacctttggcgcgacggaagatcgcgtagttagcaagatcgttcgcacagagaacgagtttgtgagtgtcatgaaagaagcgcaggccgatgttaaccgcatgtattggattgaactggttctggagaaagaagatgcaccgaaactgctgaagaagatggggaagctgtttgcagaacagaacaaa

SEQ ID NO: 384 - protein, 547 aa, Artificial Sequence
  Variant of branched-chain keto acid decarboxylase (kdcA) from Lactococcus lactis
MYTVGDYLLDRLHELGIEEIFGVPGDYNLQFLDQIISREDMKWIGNANELNASYMADGYARTKKAAAFLTTFGVGELSAINGLAGSYAENLPVVEIVGSPTSKVQNDGKFVHHTLADGDFKHFMKMHEPVTAARTLLTAENATYEIDRVLSQLLKERKPVYINLPVDVAAAKAEKPALSLEKESSTTNTTEQVILSKIEESLKNAQKPVVIAGHEVISFGLEKTVTQFVSETLLPITTLNFGKSAVDESLPSFLGIYNGKLSEISLKNFVESADFILMLGVKLTDSSTGAFTHHLDENKMISLNIDEGIIFNKVVEDFDFRAVVSSLSELKGIEYEGQYIDKQYEEFIPSSAPLSQDRLWQAVESLTQSNETIVAEQGTSFFGASTIFLKSNSRFIGQPLWGSIGYTFPAALGSQIADKESRHLLFIGDGSLQLTVQELGLSIREKLNPICFIINNDGYTVEREIHGPTQSYNDIPMWNYSKLPETFGATEDRVVSKIVRTENEFVSVMKEAQADVNRMYWIELVLEKEDAPKLLKKMGKLFAEQNK

SEQ ID NO: 385 - DNA, 1641 bp, Artificial Sequence
  Variant of branched-chain keto acid decarboxylase (kdcA) from Lactococcus lactis
atgtacaccgttggcgactatctgctggaccgtctgcatgaactgggaattgaagaaatctttggcgtgccgggcgattacaatctgcaattcctggatcaaatcattagccgcgaagatatgaaatggattggtaacgcgaatgaactgaatgcgagctacatggctgatggctatgcacgtacgaagaaggcggcggcgttcctgacgaccttcggtgttggtgaactgagcgcaatcaatgggttggcgggcagctatgcagagaacctgccagtcgtggaaatcgttgggagtccgacctcgaaggtgcagaacgatggcaagttcgttcatcacaccctggccgacggcgacttcaagcacttcatgaagatgcacgaaccggtcaccgctgcacgtacactgctgaccgccgagaacgcgacctatgagattgaccgcgtgctgagccaactgctgaaagaacgtaaacctgtgtacatcaacctgccggttgatgtcgccgcggcgaaagccgagaaaccagctctgagcctggagaaagaaagcagcacgaccaacaccacagaacaggtgatcctgtcgaagatcgaagaaagcctgaagaacgcccagaaaccggtcgtgatcgctgggcacgaggtgattagcttcggtctggagaagacggttacgcagtttgtgagtgaaaccaaagcaccgattactaccctgaactttggcaaatcggctgtggatgaatccctgccgtccttcctgggtatctacaatggtaaactgagcgagattagcctcaagaactttgtggaaagcgcagacttcatcctgatgcttggtgtgaaactgacggatagcagtacgggcgcgtttacgcaccatctggacgagaacaagatgattagcctgaacattgatgaaggcatcatcttcaacaaagtcgtagaagacttcgatttccgtgcggttgttagcagcctgagcgagctgaaaggcattgaatacgaaggtcagtacattgataagcagtacgaagagttcattccgagcagcgcaccactgagccaagaccgtctgtggcaagcagtagaatctctgacacagtccaatgaaaccattgtggcggaacagggcacgtcgttcttcggtgcctccaccatcttcctgaagagcaattcacgcttcatcggtcagccgctttggggcagcatcggctatacgtttccggcagcactgggatcacagattgcggataaggaaagtcgccatctgctgttcattggtgatggtagcctgcaactgaccgtgcaggagctgggcctgtcgatccgtgagaaactgaacccgatttgtttcatcatcaacaacgatggctataccgtagagcgcgagattcatgggcctacacagagctacaatgacatcccgatgtggaactatagcaaactgccggaaacctttggcgcgacggaagatcgcgtagttagcaagatcgttcgcacagagaacgagtttgtgagtgtcatgaaagaagcgcaggccgatgttaaccgcatgtattggattgaactggttctggagaaagaagatgcaccgaaactgctgaagaagatggggaagctgtttgcagaacagaacaaa

SEQ ID NO: 386 - protein, 547 aa, Artificial Sequence
  Variant of branched-chain keto acid decarboxylase (kdcA) from Lactococcus lactis
MYTVGDYLLDRLHELGIEEIFGVPGDYNLQFLDQIISREDMKWIGNANELNASYMADGYARTKKAAAFLTTFGVGELSAINGLAGSYAENLPVVEIVGSPTSKVQNDGKFVHHTLADGDFKHFMKMHEPVTAARTLLTAENATYEIDRVLSQLLKERKPVYINLPVDVAAAKAEKPALSLEKESSTTNTTEQVILSKIEESLKNAQKPVVIAGHEVISFGLEKTVTQFVSETKAPITTLNFGKSAVDESLPSFLGIYNGKLSEISLKNFVESADFILMLGVKLTDSSTGAFTHHLDENKMISLNIDEGIIFNKVVEDFDFRAVVSSLSELKGIEYEGQYIDKQYEEFIPSSAPLSQDRLWQAVESLTQSNETIVAEQGTSFFGASTIFLKSNSRFIGQPLWGSIGYTFPAALGSQIADKESRHLLFIGDGSLQLTVQELGLSIREKLNPICFIINNDGYTVEREIHGPTQSYNDIPMWNYSKLPETFGATEDRVVSKIVRTENEFVSVMKEAQADVNRMYWIELVLEKEDAPKLLKKMGKLFAEQNK

SEQ ID NO: 387 - DNA, 1641 bp, Artificial Sequence
  Variant of branched-chain keto acid decarboxylase (kdcA) from Lactococcus lactis
atgtacaccgttggcgactatctgctggaccgtctgcatgaactgggaattgaagaaatctttggcgtgccgggcgattacaatctgcaattcctggatcaaatcattagccgcgaagatatgaaatggattggtaacgcgaatgaactgaatgcgagctacatggctgatggctatgcacgtacgaagaaggcggcggcgttcctgacgaccttcggtgttggtgaactgagcgcaatcaatgggttggcgggcagctatgcagagaacctgccagtcgtggaaatcgttgggagtccgacctcgaaggtgcagaacgatggcaagttcgttcatcacaccctggccgacggcgacttcaagcacttcatgaagatgcacgaaccggtcaccgctgcacgtacactgctgaccgccgagaacgcgacctatgagattgaccgcgtgctgagccaactgctgaaagaacgtaaacctgtgtacatcaacctgccggttgatgtcgccgcggcgaaagccgagaaaccagctctgagcctggagaaagaaagcagcacgaccaacaccacagaacaggtgatcctgtcgaagatcgaagaaagcctgaagaacgcccagaaaccggtcgtgatcgctgggcacgaggtgattagcttcggtctggagaagacggttacgcagtttgtgagtgaaaccaaactgccgattactaccctgaactttggcaaatcggctgtggatgaatccctgccgtccttcgcaggtatctacaatggtaaactgagcgagattagcctcaagaactttgtggaaagcgcagacttcatcctgatgcttggtgtgaaactgacggatagcagtacgggcgcgtttacgcaccatctggacgagaacaagatgattagcctgaacattgatgaaggcatcatcttcaacaaagtcgtagaagacttcgatttccgtgcggttgttagcagcctgagcgagctgaaaggcattgaatacgaaggtcagtacattgataagcagtacgaagagttcattccgagcagcgcaccactgagccaagaccgtctgtggcaagcagtagaatctctgacacagtccaatgaaaccattgtggcggaacagggcacgtcgttcttcggtgcctccaccatcttcctgaagagcaattcacgcttcatcggtcagccgctttggggcagcatcggctatacgtttccggcagcactgggatcacagattgcggataaggaaagtcgccatctgctgttcattggtgatggtagcctgcaactgaccgtgcaggagctgggcctgtcgatccgtgagaaactgaacccgatttgtttcatcatcaacaacgatggctataccgtagagcgcgagattcatgggcctacacagagctacaatgacatcccgatgtggaactatagcaaactgccggaaacctttggcgcgacggaagatcgcgtagttagcaagatcgttcgcacagagaacgagtttgtgagtgtcatgaaagaagcgcaggccgatgttaaccgcatgtattggattgaactggttctggagaaagaagatgcaccgaaactgctgaagaagatggggaagctgtttgcagaacagaacaaa

SEQ ID NO: 388 - protein, 547 aa, Artificial Sequence
  Variant of branched-chain keto acid decarboxylase (kdcA) from Lactococcus lactis
MYTVGDYLLDRLHELGIEEIFGVPGDYNLQFLDQIISREDMKWIGNANELNASYMADGYARTKKAAAFLTTFGVGELSAINGLAGSYAENLPVVEIVGSPTSKVQNDGKFVHHTLADGDFKHFMKMHEPVTAARTLLTAENATYEIDRVLSQLLKERKPVYINLPVDVAAAKAEKPALSLEKESSTTNTTEQVILSKIEESLKNAQKPVVIAGHEVISFGLEKTVTQFVSETKLPITTLNFGKSAVDESLPSFAGIYNGKLSEISLKNFVESADFILMLGVKLTDSSTGAFTHHLDENKMISLNIDEGIIFNKVVEDFDFRAVVSSLSELKGIEYEGQYIDKQYEEFIPSSAPLSQDRLWQAVESLTQSNETIVAEQGTSFFGASTIFLKSNSRFIGQPLWGSIGYTFPAALGSQIADKESRHLLFIGDGSLQLTVQELGLSIREKLNPICFIINNDGYTVEREIHGPTQSYNDIPMWNYSKLPETFGATEDRVVSKIVRTENEFVSVMKEAQADVNRMYWIELVLEKEDAPKLLKKMGKLFAEQNK

SEQ ID NO: 389 - DNA, 1641 bp, Artificial Sequence
  Variant of branched-chain keto acid decarboxylase (kdcA) from Lactococcus lactis
atgtacaccgttggcgactatctgctggaccgtctgcatgaactgggaattgaagaaatctttggcgtgccgggcgattacaatctgcaattcctggatcaaatcattagccgcgaagatatgaaatggattggtaacgcgaatgaactgaatgcgagctacatggctgatggctatgcacgtacgaagaaggcggcggcgttcctgacgaccttcggtgttggtgaactgagcgcaatcaatgggttggcgggcagctatgcagagaacctgccagtcgtggaaatcgttgggagtccgacctcgaaggtgcagaacgatggcaagttcgttcatcacaccctggccgacggcgacttcaagcacttcatgaagatgcacgaaccggtcaccgctgcacgtacactgctgaccgccgagaacgcgacctatgagattgaccgcgtgctgagccaactgctgaaagaacgtaaacctgtgtacatcaacctgccggttgatgtcgccgcggcgaaagccgagaaaccagctctgagcctggagaaagaaagcagcacgaccaacaccacagaacaggtgatcctgtcgaagatcgaagaaagcctgaagaacgcccagaaaccggtcgtgatcgctgggcacgaggtgattagcttcggtctggagaagacggttacgcagtttgtgagtgaaaccaaactgccgattactaccctgaactttggcaaatcggctgtggatgaatccctgccgtcccatctgggtatctacaatggtaaactgagcgagattagcctcaagaactttgtggaaagcgcagacttcatcctgatgcttggtgtgaaactgacggatagcagtacgggcgcgtttacgcaccatctggacgagaacaagatgattagcctgaacattgatgaaggcatcatcttcaacaaagtcgtagaagacttcgatttccgtgcggttgttagcagcctgagcgagctgaaaggcattgaatacgaaggtcagtacattgataagcagtacgaagagttcattccgagcagcgcaccactgagccaagaccgtctgtggcaagcagtagaatctctgacacagtccaatgaaaccattgtggcggaacagggcacgtcgttcttcggtgcctccaccatcttcctgaagagcaattcacgcttcatcggtcagccgctttggggcagcatcggctatacgtttccggcagcactgggatcacagattgcggataaggaaagtcgccatctgctgttcattggtgatggtagcctgcaactgaccgtgcaggagctgggcctgtcgatccgtgagaaactgaacccgatttgtttcatcatcaacaacgatggctataccgtagagcgcgagattcatgggcctacacagagctacaatgacatcccgatgtggaactatagcaaactgccggaaacctttggcgcgacggaagatcgcgtagttagcaagatcgttcgcacagagaacgagtttgtgagtgtcatgaaagaagcgcaggccgatgttaaccgcatgtattggattgaactggttctggagaaagaagatgcaccgaaactgctgaagaagatggggaagctgtttgcagaacagaacaaa

SEQ ID NO: 390 - protein, 547 aa, Artificial Sequence
  Variant of branched-chain keto acid decarboxylase (kdcA) from Lactococcus lactis
MYTVGDYLLDRLHELGIEEIFGVPGDYNLQFLDQIISREDMKWIGNANELNASYMADGYARTKKAAAFLTTFGVGELSAINGLAGSYAENLPVVEIVGSPTSKVQNDGKFVHHTLADGDFKHFMKMHEPVTAARTLLTAENATYEIDRVLSQLLKERKPVYINLPVDVAAAKAEKPALSLEKESSTTNTTEQVILSKIEESLKNAQKPVVIAGHEVISFGLEKTVTQFVSETKLPITTLNFGKSAVDESLPSHLGIYNGKLSEISLKNFVESADFILMLGVKLTDSSTGAFTHHLDENKMISLNIDEGIIFNKVVEDFDFRAVVSSLSELKGIEYEGQYIDKQYEEFIPSSAPLSQDRLWQAVESLTQSNETIVAEQGTSFFGASTIFLKSNSRFIGQPLWGSIGYTFPAALGSQIADKESRHLLFIGDGSLQLTVQELGLSIREKLNPICFIINNDGYTVEREIHGPTQSYNDIPMWNYSKLPETFGATEDRVVSKIVRTENEFVSVMKEAQADVNRMYWIELVLEKEDAPKLLKKMGKLFAEQNK

SEQ ID NO: 391 - DNA, 1641 bp, Artificial Sequence
  Variant of branched-chain keto acid decarboxylase (kdcA) from Lactococcus lactis
atgtacaccgttggcgactatctgctggaccgtctgcatgaactgggaattgaagaaatctttggcgtgccgggcgattacaatctgcaattcctggatcaaatcattagccgcgaagatatgaaatggattggtaacgcgaatgaactgaatgcgagctacatggctgatggctatgcacgtacgaagaaggcggcggcgttcctgacgaccttcggtgttggtgaactgagcgcaatcaatgggttggcgggcagctatgcagagaacctgccagtcgtggaaatcgttgggagtccgacctcgaaggtgcagaacgatggcaagttcgttcatcacaccctggccgacggcgacttcaagcacttcatgaagatgcacgaaccggtcaccgctgcacgtacactgctgaccgccgagaacgcgacctatgagattgaccgcgtgctgagccaactgctgaaagaacgtaaacctgtgtacatcaacctgccggttgatgtcgccgcggcgaaagccgagaaaccagctctgagcctggagaaagaaagcagcacgaccaacaccacagaacaggtgatcctgtcgaagatcgaagaaagcctgaagaacgcccagaaaccggtcgtgatcgctgggcacgaggtgattagcttcggtctggagaagacggttacgcagtttgtgagtgaaaccaaactgccgattactaccctgaactttggcaaatcggctgtggatgaatccctgccgtcctatctgggtatctacaatggtaaactgagcgagattagcctcaagaactttgtggaaagcgcagacttcatcctgatgcttggtgtgaaactgacggatagcagtacgggcgcgtttacgcaccatctggacgagaacaagatgattagcctgaacattgatgaaggcatcatcttcaacaaagtcgtagaagacttcgatttccgtgcggttgttagcagcctgagcgagctgaaaggcattgaatacgaaggtcagtacattgataagcagtacgaagagttcattccgagcagcgcaccactgagccaagaccgtctgtggcaagcagtagaatctctgacacagtccaatgaaaccattgtggcggaacagggcacgtcgttcttcggtgcctccaccatcttcctgaagagcaattcacgcttcatcggtcagccgctttggggcagcatcggctatacgtttccggcagcactgggatcacagattgcggataaggaaagtcgccatctgctgttcattggtgatggtagcctgcaactgaccgtgcaggagctgggcctgtcgatccgtgagaaactgaacccgatttgtttcatcatcaacaacgatggctataccgtagagcgcgagattcatgggcctacacagagctacaatgacatcccgatgtggaactatagcaaactgccggaaacctttggcgcgacggaagatcgcgtagttagcaagatcgttcgcacagagaacgagtttgtgagtgtcatgaaagaagcgcaggccgatgttaaccgcatgtattggattgaactggttctggagaaagaagatgcaccgaaactgctgaagaagatggggaagctgtttgcagaacagaacaaa

SEQ ID NO: 392 - protein, 547 aa, Artificial Sequence
  Variant of branched-chain keto acid decarboxylase (kdcA) from Lactococcus lactis
MYTVGDYLLDRLHELGIEEIFGVPGDYNLQFLDQIISREDMKWIGNANELNASYMADGYARTKKAAAFLTTFGVGELSAINGLAGSYAENLPVVEIVGSPTSKVQNDGKFVHHTLADGDFKHFMKMHEPVTAARTLLTAENATYEIDRVLSQLLKERKPVYINLPVDVAAAKAEKPALSLEKESSTTNTTEQVILSKIEESLKNAQKPVVIAGHEVISFGLEKTVTQFVSETKLPITTLNFGKSAVDESLPSYLGIYNGKLSEISLKNFVESADFILMLGVKLTDSSTGAFTHHLDENKMISLNIDEGIIFNKVVEDFDFRAVVSSLSELKGIEYEGQYIDKQYEEFIPSSAPLSQDRLWQAVESLTQSNETIVAEQGTSFFGASTIFLKSNSRFIGQPLWGSIGYTFPAALGSQIADKESRHLLFIGDGSLQLTVQELGLSIREKLNPICFIINNDGYTVEREIHGPTQSYNDIPMWNYSKLPETFGATEDRVVSKIVRTENEFVSVMKEAQADVNRMYWIELVLEKEDAPKLLKKMGKLFAEQNK

SEQ ID NO: 393 - DNA, 1641 bp, Artificial Sequence
  Variant of branched-chain keto acid decarboxylase (kdcA) from Lactococcus lactis
atgtacaccgttggcgactatctgctggaccgtctgcatgaactgggaattgaagaaatctttggcgtgccgggcgattacaatctgcaattcctggatcaaatcattagccgcgaagatatgaaatggattggtaacgcgaatgaactgaatgcgagctacatggctgatggctatgcacgtacgaagaaggcggcggcgttcctgacgaccttcggtgttggtgaactgagcgcaatcaatgggttggcgggcagctatgcagagaacctgccagtcgtggaaatcgttgggagtccgacctcgaaggtgcagaacgatggcaagttcgttcatcacaccctggccgacggcgacttcaagcacttcatgaagatgcacgaaccggtcaccgctgcacgtacactgctgaccgccgagaacgcgacctatgagattgaccgcgtgctgagccaactgctgaaagaacgtaaacctgtgtacatcaacctgccggttgatgtcgccgcggcgaaagccgagaaaccagctctgagcctggagaaagaaagcagcacgaccaacaccacagaacaggtgatcctgtcgaagatcgaagaaagcctgaagaacgcccagaaaccggtcgtgatcgctgggcacgaggtgattagcttcggtctggagaagacggttacgcagtttgtgagtgaaaccaaactgccgattactaccctgaactttggcaaatcggctgtggatgaatccctgccgtccttcggtggtatctacaatggtaaactgagcgagattagcctcaagaactttgtggaaagcgcagacttcatcctgatgcttggtgtgaaactgacggatagcagtacgggcgcgtttacgcaccatctggacgagaacaagatgattagcctgaacattgatgaaggcatcatcttcaacaaagtcgtagaagacttcgatttccgtgcggttgttagcagcctgagcgagctgaaaggcattgaatacgaaggtcagtacattgataagcagtacgaagagttcattcctagcagcgcaccactgagccaagaccgtctgtggcaagcagtagaatctctgacacagtccaatgaaaccattgtggcggaacagggcacgtcgttcttcggtgcctccaccatcttcctgaagagcaattcacgcttcatcggtcagccgctttggggcagcatcggctatacgtttccggcagcactgggatcacagattgcggataaggaaagtcgccatctgctgttcattggtgatggtagcctgcaactgaccgtgcaggagctgggcctgtcgatccgtgagaaactgaacccgatttgtttcatcatcaacaacgatggctataccgtagagcgcgagattcatgggcctacacagagctacaatgacatcccgatgtggaactatagcaaactgccggaaacctttggcgcgacggaagatcgcgtagttagcaagatcgttcgcacagagaacgagtttgtgagtgtcatgaaagaagcgcaggccgatgttaaccgcatgtattggattgaactggttctggagaaagaagatgcaccgaaactgctgaagaagatggggaagctgtttgcagaacagaacaaa

SEQ ID NO: 394 - protein, 547 aa, Artificial Sequence
  Variant of branched-chain keto acid decarboxylase (kdcA) from Lactococcus lactis
MYTVGDYLLDRLHELGIEEIFGVPGDYNLQFLDQIISREDMKWIGNANELNASYMADGYARTKKAAAFLTTFGVGELSAINGLAGSYAENLPVVEIVGSPTSKVQNDGKFVHHTLADGDFKHFMKMHEPVTAARTLLTAENATYEIDRVLSQLLKERKPVYINLPVDVAAAKAEKPALSLEKESSTTNTTEQVILSKIEESLKNAQKPVVIAGHEVISFGLEKTVTQFVSETKLPITTLNFGKSAVDESLPSFGGIYNGKLSEISLKNFVESADFILMLGVKLTDSSTGAFTHHLDENKMISLNIDEGIIFNKVVEDFDFRAVVSSLSELKGIEYEGQYIDKQYEEFIPSSAPLSQDRLWQAVESLTQSNETIVAEQGTSFFGASTIFLKSNSRFIGQPLWGSIGYTFPAALGSQIADKESRHLLFIGDGSLQLTVQELGLSIREKLNPICFIINNDGYTVEREIHGPTQSYNDIPMWNYSKLPETFGATEDRVVSKIVRTENEFVSVMKEAQADVNRMYWIELVLEKEDAPKLLKKMGKLFAEQNK

SEQ ID NO: 395 - DNA, 1641 bp, Artificial Sequence
  Variant of branched-chain keto acid decarboxylase (kdcA) from Lactococcus lactis
atgtacaccgttggcgactatctgctggaccgtctgcatgaactgggaattgaagaaatctttggcgtgccgggcgattacaatctgcaattcctggatcaaatcattagccgcgaagatatgaaatggattggtaacgcgaatgaactgaatgcgagctacatggctgatggctatgcacgtacgaagaaggcggcggcgttcctgacgaccttcggtgttggtgaactgagcgcaatcaatgggttggcgggcagctatgcagagaacctgccagtcgtggaaatcgttgggagtccgacctcgaaggtgcagaacgatggcaagttcgttcatcacaccctggccgacggcgacttcaagcacttcatgaagatgcacgaaccggtcaccgctgcacgtacactgctgaccgccgagaacgcgacctatgagattgaccgcgtgctgagccaactgctgaaagaacgtaaacctgtgtacatcaacctgccggttgatgtcgccgcggcgaaagccgagaaaccagctctgagcctggagaaagaaagcagcacgaccaacaccacagaacaggtgatcctgtcgaagatcgaagaaagcctgaagaacgcccagaaaccggtcgtgatcgctgggcacgaggtgattagcttcggtctggagaagacggttacgcagtttgtgagtgaaaccaaactgccgattactaccctgaactttggcaaatcggctgtggatgaatccctgccgtccttcctgggtatctacaatggtaaactgacagagattagcctcaagaactttgtggaaagcgcagacttcatcctgatgcttggtgtgaaactgacggatagcagtacgggcgcgtttacgcaccatctggacgagaacaagatgattagcctgaacattgatgaaggcatcatcttcaacaaagtcgtagaagacttcgatttccgtgcggttgttagcagcctgagcgagctgaaaggcattgaatacgaaggtcagtacattgataagcagtacgaagagttcattccgagcagcgcaccactgagccaagaccgtctgtggcaagcagtagaatctctgacacagtccaatgaaaccattgtggcggaacagggcacgtcgttcttcggtgcctccaccatcttcctgaagagcaattcacgcttcatcggtcagccgctttggggcagcatcggctatacgtttccggcagcactgggatcacagattgcggataaggaaagtcgccatctgctgttcattggtgatggtagcctgcaactgaccgtgcaggagctgggcctgtcgatccgtgagaaactgaacccgatttgtttcatcatcaacaacgatggctataccgtagagcgcgagattcatgggcctacacagagctacaatgacatcccgatgtggaactatagcaaactgccggaaacctttggcgcgacggaagatcgcgtagttagcaagatcgttcgcacagagaacgagtttgtgagtgtcatgaaagaagcgcaggccgatgttaaccgcatgtattggattgaactggttctggagaaagaagatgcaccgaaactgctgaagaagatggggaagctgtttgcagaacagaacaaa

SEQ ID NO: 396 - protein, 547 aa, Artificial Sequence
  Variant of branched-chain keto acid decarboxylase (kdcA) from Lactococcus lactis
MYTVGDYLLDRLHELGIEEIFGVPGDYNLQFLDQIISREDMKWIGNANELNASYMADGYARTKKAAAFLTTFGVGELSAINGLAGSYAENLPVVEIVGSPTSKVQNDGKFVHHTLADGDFKHFMKMHEPVTAARTLLTAENATYEIDRVLSQLLKERKPVYINLPVDVAAAKAEKPALSLEKESSTTNTTEQVILSKIEESLKNAQKPVVIAGHEVISFGLEKTVTQFVSETKLPITTLNFGKSAVDESLPSFLGIYNGKLTEISLKNFVESADFILMLGVKLTDSSTGAFTHHLDENKMISLNIDEGIIFNKVVEDFDFRAVVSSLSELKGIEYEGQYIDKQYEEFIPSSAPLSQDRLWQAVESLTQSNETIVAEQGTSFFGASTIFLKSNSRFIGQPLWGSIGYTFPAALGSQIADKESRHLLFIGDGSLQLTVQELGLSIREKLNPICFIINNDGYTVEREIHGPTQSYNDIPMWNYSKLPETFGATEDRVVSKIVRTENEFVSVMKEAQADVNRMYWIELVLEKEDAPKLLKKMGKLFAEQNK

SEQ ID NO: 397 - DNA, 1641 bp, Artificial Sequence
  Variant of branched-chain keto acid decarboxylase (kdcA) from Lactococcus lactis
atgtacaccgttggcgactatctgctggaccgtctgcatgaactgggaattgaagaaatctttggcgtgccgggcgattacaatctgcaattcctggatcaaatcattagccgcgaagatatgaaatggattggtaacgcgaatgaactgaatgcgagctacatggctgatggctatgcacgtacgaagaaggcggcggcgttcctgacgaccttcggtgttggtgaactgagcgcaatcaatgggttggcgggcagctatgcagagaacctgccagtcgtggaaatcgttgggagtccgacctcgaaggtgcagaacgatggcaagttcgttcatcacaccctggccgacggcgacttcaagcacttcatgaagatgcacgaaccggtcaccgctgcacgtacactgctgaccgccgagaacgcgacctatgagattgaccgcgtgctgagccaactgctgaaagaacgtaaacctgtgtacatcaacctgccggttgatgtcgccgcggcgaaagccgagaaaccagctctgagcctggagaaagaaagcagcacgaccaacaccacagaacaggtgatcctgtcgaagatcgaagaaagcctgaagaacgcccagaaaccggtcgtgatcgctgggcacgaggtgattagcttcggtctggagaagacggttacgcagtttgtgagtgaaaccaaactgccgattactaccctgaactttggcaaatcggctgtggatgaatccctgccgtccttcagtggtatctacaatggtaaactgagcgagattagcctcaagaactttgtggaaagcgcagacttcatcctgatgcttggtgtgaaactgacggatagcagtacgggcgcgtttacgcaccatctggacgagaacaagatgattagcctgaacattgatgaaggcatcatcttcaacaaagtcgtagaagacttcgatttccgtgcggttgttagcagcctgagcgagctgaaaggcattgaatacgaaggtcagtacattgataagcagtacgaagagttcattccgagcagcgcaccactgagccaagaccgtctgtggcaagcagtagaatctctgacacagtccaatgaaaccattgtggcggaacagggcacgtcgttcttcggtgcctccaccatcttcctgaagagcaattcacgcttcatcggtcagccgctttggggcagcatcggctatacgtttccggcagcactgggatcacagattgcggataaggaaagtcgccatctgctgttcattggtgatggtagcctgcaactgaccgtgcaggagctgggcctgtcgatccgtgagaaactgaacccgatttgtttcatcatcaacaacgatggctataccgtagagcgcgagattcatgggcctacacagagctacaatgacatcccgatgtggaactatagcaaactgccggaaacctttggcgcgacggaagatcgcgtagttagcaagatcgttcgcacagagaacgagtttgtgagtgtcatgaaagaagcgcaggccgatgttaaccgcatgtattggattgaactggttctggagaaagaagatgcaccgaaactgctgaagaagatggggaagctgtttgcagaacagaacaaa

SEQ ID NO: 398 - protein, 547 aa, Artificial Sequence
  Variant of branched-chain keto acid decarboxylase (kdcA) from Lactococcus lactis
MYTVGDYLLDRLHELGIEEIFGVPGDYNLQFLDQIISREDMKWIGNANELNASYMADGYARTKKAAAFLTTFGVGELSAINGLAGSYAENLPVVEIVGSPTSKVQNDGKFVHHTLADGDFKHFMKMHEPVTAARTLLTAENATYEIDRVLSQLLKERKPVYINLPVDVAAAKAEKPALSLEKESSTTNTTEQVILSKIEESLKNAQKPVVIAGHEVISFGLEKTVTQFVSETKLPITTLNFGKSAVDESLPSFSGIYNGKLSEISLKNFVESADFILMLGVKLTDSSTGAFTHHLDENKMISLNIDEGIIFNKVVEDFDFRAVVSSLSELKGIEYEGQYIDKQYEEFIPSSAPLSQDRLWQAVESLTQSNETIVAEQGTSFFGASTIFLKSNSRFIGQPLWGSIGYTFPAALGSQIADKESRHLLFIGDGSLQLTVQELGLSIREKLNPICFIINNDGYTVEREIHGPTQSYNDIPMWNYSKLPETFGATEDRVVSKIVRTENEFVSVMKEAQADVNRMYWIELVLEKEDAPKLLKKMGKLFAEQNK

SEQ ID NO: 399 - DNA, 1641 bp, Artificial Sequence
  Variant of branched-chain keto acid decarboxylase (kdcA) from Lactococcus lactis
atgtacaccgttggcgactatctgctggaccgtctgcatgaactgggaattgaagaaatctttggcgtgccgggcgattacaatctgcaattcctggatcaaatcattagccgcgaagatatgaaatggattggtaacgcgaatgaactgaatgcgagctacatggctgatggctatgcacgtacgaagaaggcggcggcgttcctgacgaccttcggtgttggtgaactgagcgcaatcaatgggttggcgggcagctatgcagagaacctgccagtcgtggaaatcgttgggagtccgacctcgaaggtgcagaacgatggcaagttcgttcatcacaccctggccgacggcgacttcaagcacttcatgaagatgcacgaaccggtcaccgctgcacgtacactgctgaccgccgagaacgcgacctatgagattgaccgcgtgctgagccaactgctgaaagaacgtaaacctgtgtacatcaacctgccggttgatgtcgccgcggcgaaagccgagaaaccagctctgagcctggagaaagaaagcagcacgaccaacaccacagaacaggtgatcctgtcgaagatcgaagaaagcctgaagaacgcccagaaaccggtcgtgatcgctgggcacgaggtgattagcttcggtctggagaagacggttacgcagtttgtgagtgaaaccaaactgccgattactaccctgaactttggcaaatcggctgtggatgaatccctgccgtccttcctgggtgtttacaatggtaaactgagcgagattagcctcaagaactttgtggaaagcgcagacttcatcctgatgcttggtgtgaaactgacggatagcagtacgggcgcgtttacgcaccatctggacgagaacaagatgattagcctgaacattgatgaaggcatcatcttcaacaaagtcgtagaagacttcgatttccgtgcggttgttagcagcctgagcgagctgaaaggcattgaatacgaaggtcagtacattgataagcagtacgaagagttcattccgagcagcgcaccactgagccaagaccgtctgtggcaagcagtagaatctctgacacagtccaatgaaaccattgtggcggaacagggcacgtcgttcttcggtgcctccaccatcttcctgaagagcaattcacgcttcatcggtcagccgctttggggcagcatcggctatacgtttccggcagcactgggatcacagattgcggataaggaaagtcgccatctgctgttcattggtgatggtagcctgcaactgaccgtgcaggagctgggcctgtcgatccgtgagaaactgaacccgatttgtttcatcatcaacaacgatggctataccgtagagcgcgagattcatgggcctacacagagctacaatgacatcccgatgtggaactatagcaaactgccggaaacctttggcgcgacggaagatcgcgtagttagcaagatcgttcgcacagagaacgagtttgtgagtgtcatgaaagaagcgcaggccgatgttaaccgcatgtattggattgaactggttctggagaaagaagatgcaccgaaactgctgaagaagatggggaagctgtttgcagaacagaacaaa

SEQ ID NO: 400 - protein, 547 aa, Artificial Sequence
  Variant of branched-chain keto acid decarboxylase (kdcA) from Lactococcus lactis
MYTVGDYLLDRLHELGIEEIFGVPGDYNLQFLDQIISREDMKWIGNANELNASYMADGYARTKKAAAFLTTFGVGELSAINGLAGSYAENLPVVEIVGSPTSKVQNDGKFVHHTLADGDFKHFMKMHEPVTAARTLLTAENATYEIDRVLSQLLKERKPVYINLPVDVAAAKAEKPALSLEKESSTTNTTEQVILSKIEESLKNAQKPVVIAGHEVISFGLEKTVTQFVSETKLPITTLNFGKSAVDESLPSFLGVYNGKLSEISLKNFVESADFILMLGVKLTDSSTGAFTHHLDENKMISLNIDEGIIFNKVVEDFDFRAVVSSLSELKGIEYEGQYIDKQYEEFIPSSAPLSQDRLWQAVESLTQSNETIVAEQGTSFFGASTIFLKSNSRFIGQPLWGSIGYTFPAALGSQIADKESRHLLFIGDGSLQLTVQELGLSIREKLNPICFIINNDGYTVEREIHGPTQSYNDIPMWNYSKLPETFGATEDRVVSKIVRTENEFVSVMKEAQADVNRMYWIELVLEKEDAPKLLKKMGKLFAEQNK

SEQ ID NO: 401 - DNA, 1641 bp, Artificial Sequence
  Variant of branched-chain keto acid decarboxylase (kdcA) from Lactococcus lactis
atgtacaccgttggcgactatctgctggaccgtctgcatgaactgggaattgaagaaatctttggcgtgccgggcgattacaatctgcaattcctggatcaaatcattagccgcgaagatatgaaatggattggtaacgcgaatgaactgaatgcgagctacatggctgatggctatgcacgtacgaagaaggcggcggcgttcctgacgaccttcggtgttggtgaactgagcgcaatcaatgggttggcgggcagctatgcagagaacctgccagtcgtggaaatcgttgggagtccgacctcgaaggtgcagaacgatggcaagttcgttcatcacaccctggccgacggcgacttcaagcacttcatgaagatgcacgaaccggtcaccgctgcacgtacactgctgaccgccgagaacgcgacctatgagattgaccgcgtgctgagccaactgctgaaagaacgtaaacctgtgtacatcaacctgccggttgatgtcgccgcggcgaaagccgagaaaccagctctgagcctggagaaagaaagcagcacgaccaacaccacagaacaggtgatcctgtcgaagatcgaagaaagcctgaagaacgcccagaaaccggtcgtgatcgctgggcacgaggtgattagcttcggtctggagaagacggttacgcagtttgtgagtgaaaccaaactgccgattactaccctgaactttggcaaatcggctgtggatgaatccctgccgtccttcctgggtatctacaatggtaaactgagcgagattagcctcaagaactttgtggaaagcgcagacttcatcctgtgtcttggtgtgaaactgacggatagcagtacgggcgcgtttacgcaccatctggacgagaacaagatgattagcctgaacattgatgaaggcatcatcttcaacaaagtcgtagaagacttcgatttccgtgcggttgttagcagcctgagcgagctgaaaggcattgaatacgaaggtcagtacattgataagcagtacgaagagttcattccgagcagcgcaccactgagccaagaccgtctgtggcaagcagtagaatctctgacacagtccaatgaaaccattgtggcggaacagggcacgtcgttcttcggtgcctccaccatcttcctgaagagcaattcacgcttcatcggtcagccgctttggggcagcatcggctatacgtttccggcagcactgggatcacagattgcggataaggaaagtcgccatctgctgttcattggtgatggtagcctgcaactgaccgtgcaggagctgggcctgtcgatccgtgagaaactgaacccgatttgtttcatcatcaacaacgatggctataccgtagagcgcgagattcatgggcctacacagagctacaatgacatcccgatgtggaactatagcaaactgccggaaacctttggcgcgacggaagatcgcgtagttagcaagatcgttcgcacagagaacgagtttgtgagtgtcatgaaagaagcgcaggccgatgttaaccgcatgtattggattgaactggttctggagaaagaagatgcaccgaaactgctgaagaagatggggaagctgtttgcagaacagaacaaa

SEQ ID NO: 402 - protein, 547 aa, Artificial Sequence
  Variant of branched-chain keto acid decarboxylase (kdcA) from Lactococcus lactis
MYTVGDYLLDRLHELGIEEIFGVPGDYNLQFLDQIISREDMKWIGNANELNASYMADGYARTKKAAAFLTTFGVGELSAINGLAGSYAENLPVVEIVGSPTSKVQNDGKFVHHTLADGDFKHFMKMHEPVTAARTLLTAENATYEIDRVLSQLLKERKPVYINLPVDVAAAKAEKPALSLEKESSTTNTTEQVILSKIEESLKNAQKPVVIAGHEVISFGLEKTVTQFVSETKLPITTLNFGKSAVDESLPSFLGIYNGKLSEISLKNFVESADFILCLGVKLTDSSTGAFTHHLDENKMISLNIDEGIIFNKVVEDFDFRAVVSSLSELKGIEYEGQYIDKQYEEFIPSSAPLSQDRLWQAVESLTQSNETIVAEQGTSFFGASTIFLKSNSRFIGQPLWGSIGYTFPAALGSQIADKESRHLLFIGDGSLQLTVQELGLSIREKLNPICFIINNDGYTVEREIHGPTQSYNDIPMWNYSKLPETFGATEDRVVSKIVRTENEFVSVMKEAQADVNRMYWIELVLEKEDAPKLLKKMGKLFAEQNK

SEQ ID NO: 403 - DNA, 1641 bp, Artificial Sequence
  Variant of branched-chain keto acid decarboxylase (kdcA) from Lactococcus lactis
atgtacaccgttggcgactatctgctggaccgtctgcatgaactgggaattgaagaaatctttggcgtgccgggcgattacaatctgcaattcctggatcaaatcattagccgcgaagatatgaaatggattggtaacgcgaatgaactgaatgcgagctacatggctgatggctatgcacgtacgaagaaggcggcggcgttcctgacgaccttcggtgttggtgaactgagcgcaatcaatgggttggcgggcagctatgcagagaacctgccagtcgtggaaatcgttgggagtccgacctcgaaggtgcagaacgatggcaagttcgttcatcacaccctggccgacggcgacttcaagcacttcatgaagatgcacgaaccggtcaccgctgcacgtacactgctgaccgccgagaacgcgacctatgagattgaccgcgtgctgagccaactgctgaaagaacgtaaacctgtgtacatcaacctgccggttgatgtcgccgcggcgaaagccgagaaaccagctctgagcctggagaaagaaagcagcacgaccaacaccacagaacaggtgatcctgtcgaagatcgaagaaagcctgaagaacgcccagaaaccggtcgtgatcgctgggcacgaggtgattagcttcggtctggagaagacggttacgcagtttgtgagtgaaaccaaactgccgattactaccctgaactttggcaaatcggctgtggatgaatccctgccgtccttcctgggtatctacaatggtaaactgagcgagattagcctcaagaactttgtggaaagcgcagacttcatcctgatgcttggtgtgaaactgacggatagcagtacgggcgcgtttacgcaccatctggacgagaacaagatgattagcctgaacattgatgaaggcatcatcttcaacaaagtcgtagaagacttcgatttcgaagcggttgttagcagcctgagcgagctgaaaggcattgaatacgaaggtcagtacattgataagcagtacgaagagttcattccgagcagcgcaccactgagccaagaccgtctgtggcaagcagtagaatctctgacacagtccaatgaaaccattgtggcggaacagggcacgtcgttcttcggtgcctccaccatcttcctgaagagcaattcacgcttcatcggtcagccgctttggggcagcatcggctatacgtttccggcagcactgggatcacagattgcggataaggaaagtcgccatctgctgttcattggtgatggtagcctgcaactgaccgtgcaggagctgggcctgtcgatccgtgagaaactgaacccgatttgtttcatcatcaacaacgatggctataccgtagagcgcgagattcatgggcctacacagagctacaatgacatcccgatgtggaactatagcaaactgccggaaacctttggcgcgacggaagatcgcgtagttagcaagatcgttcgcacagagaacgagtttgtgagtgtcatgaaagaagcgcaggccgatgttaaccgcatgtattggattgaactggttctggagaaagaagatgcaccgaaactgctgaagaagatggggaagctgtttgcagaacagaacaaa

SEQ ID NO: 404 - protein, 547 aa, Artificial Sequence
  Variant of branched-chain keto acid decarboxylase (kdcA) from Lactococcus lactis
MYTVGDYLLDRLHELGIEEIFGVPGDYNLQFLDQIISREDMKWIGNANELNASYMADGYARTKKAAAFLTTFGVGELSAINGLAGSYAENLPVVEIVGSPTSKVQNDGKFVHHTLADGDFKHFMKMHEPVTAARTLLTAENATYEIDRVLSQLLKERKPVYINLPVDVAAAKAEKPALSLEKESSTTNTTEQVILSKIEESLKNAQKPVVIAGHEVISFGLEKTVTQFVSETKLPITTLNFGKSAVDESLPSFLGIYNGKLSEISLKNFVESADFILMLGVKLTDSSTGAFTHHLDENKMISLNIDEGIIFNKVVEDFDFEAVVSSLSELKGIEYEGQYIDKQYEEFIPSSAPLSQDRLWQAVESLTQSNETIVAEQGTSFFGASTIFLKSNSRFIGQPLWGSIGYTFPAALGSQIADKESRHLLFIGDGSLQLTVQELGLSIREKLNPICFIINNDGYTVEREIHGPTQSYNDIPMWNYSKLPETFGATEDRVVSKIVRTENEFVSVMKEAQADVNRMYWIELVLEKEDAPKLLKKMGKLFAEQNK

SEQ ID NO: 405 - DNA, 1641 bp, Artificial Sequence
  Variant of branched-chain keto acid decarboxylase (kdcA) from Lactococcus lactis
atgtacaccgttggcgactatctgctggaccgtctgcatgaactgggaattgaagaaatctttggcgtgccgggcgattacaatctgcaattcctggatcaaatcattagccgcgaagatatgaaatggattggtaacgcgaatgaactgaatgcgagctacatggctgatggctatgcacgtacgaagaaggcggcggcgttcctgacgaccttcggtgttggtgaactgagcgcaatcaatgggttggcgggcagctatgcagagaacctgccagtcgtggaaatcgttgggagtccgacctcgaaggtgcagaacgatggcaagttcgttcatcacaccctggccgacggcgacttcaagcacttcatgaagatgcacgaaccggtcaccgctgcacgtacactgctgaccgccgagaacgcgacctatgagattgaccgcgtgctgagccaactgctgaaagaacgtaaacctgtgtacatcaacctgccggttgatgtcgccgcggcgaaagccgagaaaccagctctgagcctggagaaagaaagcagcacgaccaacaccacagaacaggtgatcctgtcgaagatcgaagaaagcctgaagaacgcccagaaaccggtcgtgatcgctgggcacgaggtgattagcttcggtctggagaagacggttacgcagtttgtgagtgaaaccaaactgccgattactaccctgaactttggcaaatcggctgtggatgaatccctgccgtccttcctgggtatctacaatggtaaactgagcgagattagcctcaagaactttgtggaaagcgcagacttcatcctgatgcttggtgtgaaactgacggatagcagtacgggcgcgtttacgcaccatctggacgagaacaagatgattagcctgaacattgatgaaggcatcatcttcaacaaagtcgtagaagacttcgatttccgtgcggttgtttttagcctgagcgagctgaaaggcattgaatacgaaggtcagtacattgataagcagtacgaagagttcattccgagcagcgcaccactgagccaagaccgtctgtggcaagcagtagaatctctgacacagtccaatgaaaccattgtggcggaacagggcacgtcgttcttcggtgcctccaccatcttcctgaagagcaattcacgcttcatcggtcagccgctttggggcagcatcggctatacgtttccggcagcactgggatcacagattgcggataaggaaagtcgccatctgctgttcattggtgatggtagcctgcaactgaccgtgcaggagctgggcctgtcgatccgtgagaaactgaacccgatttgtttcatcatcaacaacgatggctataccgtagagcgcgagattcatgggcctacacagagctacaatgacatcccgatgtggaactatagcaaactgccggaaacctttggcgcgacggaagatcgcgtagttagcaagatcgttcgcacagagaacgagtttgtgagtgtcatgaaagaagcgcaggccgatgttaaccgcatgtattggattgaactggttctggagaaagaagatgcaccgaaactgctgaagaagatggggaagctgtttgcagaacagaacaaa

SEQ ID NO: 406 - protein, 547 aa, Artificial Sequence
  Variant of branched-chain keto acid decarboxylase (kdcA) from Lactococcus lactis
MYTVGDYLLDRLHELGIEEIFGVPGDYNLQFLDQIISREDMKWIGNANELNASYMADGYARTKKAAAFLTTFGVGELSAINGLAGSYAENLPVVEIVGSPTSKVQNDGKFVHHTLADGDFKHFMKMHEPVTAARTLLTAENATYEIDRVLSQLLKERKPVYINLPVDVAAAKAEKPALSLEKESSTTNTTEQVILSKIEESLKNAQKPVVIAGHEVISFGLEKTVTQFVSETKLPITTLNFGKSAVDESLPSFLGIYNGKLSEISLKNFVESADFILMLGVKLTDSSTGAFTHHLDENKMISLNIDEGIIFNKVVEDFDFRAVVFSLSELKGIEYEGQYIDKQYEEFIPSSAPLSQDRLWQAVESLTQSNETIVAEQGTSFFGASTIFLKSNSRFIGQPLWGSIGYTFPAALGSQIADKESRHLLFIGDGSLQLTVQELGLSIREKLNPICFIINNDGYTVEREIHGPTQSYNDIPMWNYSKLPETFGATEDRVVSKIVRTENEFVSVMKEAQADVNRMYWIELVLEKEDAPKLLKKMGKLFAEQNK

SEQ ID NO: 407 - DNA, 1641 bp, Artificial Sequence
  Variant of branched-chain keto acid decarboxylase (kdcA) from Lactococcus lactis
atgtacaccgttggcgactatctgctggaccgtctgcatgaactgggaattgaagaaatctttggcgtgccgggcgattacaatctgcaattcctggatcaaatcattagccgcgaagatatgaaatggattggtaacgcgaatgaactgaatgcgagctacatggctgatggctatgcacgtacgaagaaggcggcggcgttcctgacgaccttcggtgttggtgaactgagcgcaatcaatgggttggcgggcagctatgcagagaacctgccagtcgtggaaatcgttgggagtccgacctcgaaggtgcagaacgatggcaagttcgttcatcacaccctggccgacggcgacttcaagcacttcatgaagatgcacgaaccggtcaccgctgcacgtacactgctgaccgccgagaacgcgacctatgagattgaccgcgtgctgagccaactgctgaaagaacgtaaacctgtgtacatcaacctgccggttgatgtcgccgcggcgaaagccgagaaaccagctctgagcctggagaaagaaagcagcacgaccaacaccacagaacaggtgatcctgtcgaagatcgaagaaagcctgaagaacgcccagaaaccggtcgtgatcgctgggcacgaggtgattagcttcggtctggagaagacggttacgcagtttgtgagtgaaaccaaactgccgattactaccctgaactttggcaaatcggctgtggatgaatccctgccgtccttcctgggtatctacaatggtaaactgagcgagattagcctcaagaactttgtggaaagcgcagacttcatcctgatgcttggtgtgaaactgacggatagcagtacgggcgcgtttacgcaccatctggacgagaacaagatgattagcctgaacattgatgaaggcatcatcttcaacaaagtcgtagaagacttcgatttcagtgcggttgttagcagcctgagcgagctgaaaggcattgaatacgaaggtcagtacattgataagcagtacgaagagttcattccgagcagcgcaccactgagccaagaccgtctgtggcaagcagtagaatctctgacacagtccaatgaaaccattgtggcggaacagggcacgtcgttcttcggtgcctccaccatcttcctgaagagcaattcacgcttcatcggtcagccgctttggggcagcatcggctatacgtttccggcagcactgggatcacagattgcggataaggaaagtcgccatctgctgttcattggtgatggtagcctgcaactgaccgtgcaggagctgggcctgtcgatccgtgagaaactgaacccgatttgtttcatcatcaacaacgatggctataccgtagagcgcgagattcatgggcctacacagagctacaatgacatcccgatgtggaactatagcaaactgccggaaacctttggcgcgacggaagatcgcgtagttagcaagatcgttcgcacagagaacgagtttgtgagtgtcatgaaagaagcgcaggccgatgttaaccgcatgtattggattgaactggttctggagaaagaagatgcaccgaaactgctgaagaagatggggaagctgtttgcagaacagaacaaa

SEQ ID NO: 408 - protein, 547 aa, Artificial Sequence
  Variant of branched-chain keto acid decarboxylase (kdcA) from Lactococcus lactis
MYTVGDYLLDRLHELGIEEIFGVPGDYNLQFLDQIISREDMKWIGNANELNASYMADGYARTKKAAAFLTTFGVGELSAINGLAGSYAENLPVVEIVGSPTSKVQNDGKFVHHTLADGDFKHFMKMHEPVTAARTLLTAENATYEIDRVLSQLLKERKPVYINLPVDVAAAKAEKPALSLEKESSTTNTTEQVILSKIEESLKNAQKPVVIAGHEVISFGLEKTVTQFVSETKLPITTLNFGKSAVDESLPSFLGIYNGKLSEISLKNFVESADFILMLGVKLTDSSTGAFTHHLDENKMISLNIDEGIIFNKVVEDFDFSAVVSSLSELKGIEYEGQYIDKQYEEFIPSSAPLSQDRLWQAVESLTQSNETIVAEQGTSFFGASTIFLKSNSRFIGQPLWGSIGYTFPAALGSQIADKESRHLLFIGDGSLQLTVQELGLSIREKLNPICFIINNDGYTVEREIHGPTQSYNDIPMWNYSKLPETFGATEDRVVSKIVRTENEFVSVMKEAQADVNRMYWIELVLEKEDAPKLLKKMGKLFAEQNK

SEQ ID NO: 409 - DNA, 1641 bp, Artificial Sequence
  Variant of branched-chain keto acid decarboxylase (kdcA) from Lactococcus lactis
atgtacaccgttggcgactatctgctggaccgtctgcatgaactgggaattgaagaaatctttggcgtgccgggcgattacaatctgcaattcctggatcaaatcattagccgcgaagatatgaaatggattggtaacgcgaatgaactgaatgcgagctacatggctgatggctatgcacgtacgaagaaggcggcggcgttcctgacgaccttcggtgttggtgaactgagcgcaatcaatgggttggcgggcagctatgcagagaacctgccagtcgtggaaatcgttgggagtccgacctcgaaggtgcagaacgatggcaagttcgttcatcacaccctggccgacggcgacttcaagcacttcatgaagatgcacgaaccggtcaccgctgcacgtacactgctgaccgccgagaacgcgacctatgagattgaccgcgtgctgagccaactgctgaaagaacgtaaacctgtgtacatcaacctgccggttgatgtcgccgcggcgaaagccgagaaaccagctctgagcctggagaaagaaagcagcacgaccaacaccacagaacaggtgatcctgtcgaagatcgaagaaagcctgaagaacgcccagaaaccggtcgtgatcgctgggcacgaggtgattagcttcggtctggagaagacggttacgcagtttgtgagtgaaaccaaactgccgattactaccctgaactttggcaaatcggctgtggatgaatccctgccgtccttcctgggtatctacaatggtaaactgagcgagattagcctcaagaactttgtggaaagcgcagacttcatcctgatgcttggtgtgaaactgacggatagcagtacgggcgcgtttacgcaccatctggacgagaacaagatgattagcctgaacattgatgaaggcatcatcttcaacaaagtcgtagaagacttcgatttccttgcggttgttagcagcctgagcgagctgaaaggcattgaatacgaaggtcagtacattgataagcagtacgaagagttcattccgagcagcgcaccactgagccaagaccgtctgtggcaagcagtagaatctctgacacagtccaatgaaaccattgtggcggaacagggcacgtcgttcttcggtgcctccaccatcttcctgaagagcaattcacgcttcatcggtcagccgctttggggcagcatcggctatacgtttccggcagcactgggatcacagattgcggataaggaaagtcgccatctgctgttcattggtgatggtagcctgcaactgaccgtgcaggagctgggcctgtcgatccgtgagaaactgaacccgatttgtttcatcatcaacaacgatggctataccgtagagcgcgagattcatgggcctacacagagctacaatgacatcccgatgtggaactatagcaaactgccggaaacctttggcgcgacggaagatcgcgtagttagcaagatcgttcgcacagagaacgagtttgtgagtgtcatgaaagaagcgcaggccgatgttaaccgcatgtattggattgaactggttctggagaaagaagatgcaccgaaactgctgaagaagatggggaagctgtttgcagaacagaacaaa

SEQ ID NO: 410 - protein, 547 aa, Artificial Sequence
  Variant of branched-chain keto acid decarboxylase (kdcA) from Lactococcus lactis
MYTVGDYLLDRLHELGIEEIFGVPGDYNLQFLDQIISREDMKWIGNANELNASYMADGYARTKKAAAFLTTFGVGELSAINGLAGSYAENLPVVEIVGSPTSKVQNDGKFVHHTLADGDFKHFMKMHEPVTAARTLLTAENATYEIDRVLSQLLKERKPVYINLPVDVAAAKAEKPALSLEKESSTTNTTEQVILSKIEESLKNAQKPVVIAGHEVISFGLEKTVTQFVSETKLPITTLNFGKSAVDESLPSFLGIYNGKLSEISLKNFVESADFILMLGVKLTDSSTGAFTHHLDENKMISLNIDEGIIFNKVVEDFDFLAVVSSLSELKGIEYEGQYIDKQYEEFIPSSAPLSQDRLWQAVESLTQSNETIVAEQGTSFFGASTIFLKSNSRFIGQPLWGSIGYTFPAALGSQIADKESRHLLFIGDGSLQLTVQELGLSIREKLNPICFIINNDGYTVEREIHGPTQSYNDIPMWNYSKLPETFGATEDRVVSKIVRTENEFVSVMKEAQADVNRMYWIELVLEKEDAPKLLKKMGKLFAEQNK

SEQ ID NO: 411 - DNA, 1641 bp, Artificial Sequence
  Variant of branched-chain keto acid decarboxylase (kdcA) from Lactococcus lactis
atgtacaccgttggcgactatctgctggaccgtctgcatgaactgggaattgaagaaatctttggcgtgccgggcgattacaatctgcaattcctggatcaaatcattagccgcgaagatatgaaatggattggtaacgcgaatgaactgaatgcgagctacatggctgatggctatgcacgtacgaagaaggcggcggcgttcctgacgaccttcggtgttggtgaactgagcgcaatcaatgggttggcgggcagctatgcagagaacctgccagtcgtggaaatcgttgggagtccgacctcgaaggtgcagaacgatggcaagttcgttcatcacaccctggccgacggcgacttcaagcacttcatgaagatgcacgaaccggtcaccgctgcacgtacactgctgaccgccgagaacgcgacctatgagattgaccgcgtgctgagccaactgctgaaagaacgtaaacctgtgtacatcaacctgccggttgatgtcgccgcggcgaaagccgagaaaccagctctgagcctggagaaagaaagcagcacgaccaacaccacagaacaggtgatcctgtcgaagatcgaagaaagcctgaagaacgcccagaaaccggtcgtgatcgctgggcacgaggtgattagcttcggtctggagaagacggttacgcagtttgtgagtgaaaccaaactgccgattactaccctgaactttggcaaatcggctgtggatgaatccctgccgtccttcctgggtatctacaatggtaaactgagcgagattagcctcaagaactttgtggaaagcgcagacttcatcctgatgcttggtgtgaaactgacggatagcagtacgggcgcgtttacgcaccatctggacgagaacaagatgattagcctgaacattgatgaaggcatcatcttcaacaaagtcgtagaagacttcgatttccgtgcggttgttcttagcctgagcgagctgaaaggcattgaatacgaaggtcagtacattgataagcagtacgaagagttcattccgagcagcgcaccactgagccaagaccgtctgtggcaagcagtagaatctctgacacagtccaatgaaaccattgtggcggaacagggcacgtcgttcttcggtgcctccaccatcttcctgaagagcaattcacgcttcatcggtcagccgctttggggcagcatcggctatacgtttccggcagcactgggatcacagattgcggataaggaaagtcgccatctgctgttcattggtgatggtagcctgcaactgaccgtgcaggagctgggcctgtcgatccgtgagaaactgaacccgatttgtttcatcatcaacaacgatggctataccgtagagcgcgagattcatgggcctacacagagctacaatgacatcccgatgtggaactatagcaaactgccggaaacctttggcgcgacggaagatcgcgtagttagcaagatcgttcgcacagagaacgagtttgtgagtgtcatgaaagaagcgcaggccgatgttaaccgcatgtattggattgaactggttctggagaaagaagatgcaccgaaactgctgaagaagatggggaagctgtttgcagaacagaacaaa

SEQ ID NO: 412 - protein, 547 aa, Artificial Sequence
  Variant of branched-chain keto acid decarboxylase (kdcA) from Lactococcus lactis
MYTVGDYLLDRLHELGIEEIFGVPGDYNLQFLDQIISREDMKWIGNANELNASYMADGYARTKKAAAFLTTFGVGELSAINGLAGSYAENLPVVEIVGSPTSKVQNDGKFVHHTLADGDFKHFMKMHEPVTAARTLLTAENATYEIDRVLSQLLKERKPVYINLPVDVAAAKAEKPALSLEKESSTTNTTEQVILSKIEESLKNAQKPVVIAGHEVISFGLEKTVTQFVSETKLPITTLNFGKSAVDESLPSFLGIYNGKLSEISLKNFVESADFILMLGVKLTDSSTGAFTHHLDENKMISLNIDEGIIFNKVVEDFDFRAVVLSLSELKGIEYEGQYIDKQYEEFIPSSAPLSQDRLWQAVESLTQSNETIVAEQGTSFFGASTIFLKSNSRFIGQPLWGSIGYTFPAALGSQIADKESRHLLFIGDGSLQLTVQELGLSIREKLNPICFIINNDGYTVEREIHGPTQSYNDIPMWNYSKLPETFGATEDRVVSKIVRTENEFVSVMKEAQADVNRMYWIELVLEKEDAPKLLKKMGKLFAEQNK

SEQ ID NO: 413 - DNA, 1641 bp, Artificial Sequence
  Variant of branched-chain keto acid decarboxylase (kdcA) from Lactococcus lactis
atgtacaccgttggcgactatctgctggaccgtctgcatgaactgggaattgaagaaatctttggcgtgccgggcgattacaatctgcaattcctggatcaaatcattagccgcgaagatatgaaatggattggtaacgcgaatgaactgaatgcgagctacatggctgatggctatgcacgtacgaagaaggcggcggcgttcctgacgaccttcggtgttggtgaactgagcgcaatcaatgggttggcgggcagctatgcagagaacctgccagtcgtggaaatcgttgggagtccgacctcgaaggtgcagaacgatggcaagttcgttcatcacaccctggccgacggcgacttcaagcacttcatgaagatgcacgaaccggtcaccgctgcacgtacactgctgaccgccgagaacgcgacctatgagattgaccgcgtgctgagccaactgctgaaagaacgtaaacctgtgtacatcaacctgccggttgatgtcgccgcggcgaaagccgagaaaccagctctgagcctggagaaagaaagcagcacgaccaacaccacagaacaggtgatcctgtcgaagatcgaagaaagcctgaagaacgcccagaaaccggtcgtgatcgctgggcacgaggtgattagcttcggtctggagaagacggttacgcagtttgtgagtgaaaccaaactgccgattactaccctgaactttggcaaatcggctgtggatgaatccctgccgtccttcctgggtatctacaatggtaaactgagcgagattagcctcaagaactttgtggaaagcgcagacttcatcctgatgcttggtgtgaaactgacggatagcagtacgggcgcgtttacgcaccatctggacgagaacaagatgattagcctgaacattgatgaaggcatcatcttcaacaaagtcgtagaagacttcgatttccgtgcggttgttcatagcctgagcgagctgaaaggcattgaatacgaaggtcagtacattgataagcagtacgaagagttcattccgagcagcgcaccactgagccaagaccgtctgtggcaagcagtagaatctctgacacagtccaatgaaaccattgtggcggaacagggcacgtcgttcttcggtgcctccaccatcttcctgaagagcaattcacgcttcatcggtcagccgctttggggcagcatcggctatacgtttccggcagcactgggatcacagattgcggataaggaaagtcgccatctgctgttcattggtgatggtagcctgcaactgaccgtgcaggagctgggcctgtcgatccgtgagaaactgaacccgatttgtttcatcatcaacaacgatggctataccgtagagcgcgagattcatgggcctacacagagctacaatgacatcccgatgtggaactatagcaaactgccggaaacctttggcgcgacggaagatcgcgtagttagcaagatcgttcgcacagagaacgagtttgtgagtgtcatgaaagaagcgcaggccgatgttaaccgcatgtattggattgaactggttctggagaaagaagatgcaccgaaactgctgaagaagatggggaagctgtttgcagaacagaacaaa

SEQ ID NO: 414 - protein, 547 aa, Artificial Sequence
  Variant of branched-chain keto acid decarboxylase (kdcA) from Lactococcus lactis
MYTVGDYLLDRLHELGIEEIFGVPGDYNLQFLDQIISREDMKWIGNANELNASYMADGYARTKKAAAFLTTFGVGELSAINGLAGSYAENLPVVEIVGSPTSKVQNDGKFVHHTLADGDFKHFMKMHEPVTAARTLLTAENATYEIDRVLSQLLKERKPVYINLPVDVAAAKAEKPALSLEKESSTTNTTEQVILSKIEESLKNAQKPVVIAGHEVISFGLEKTVTQFVSETKLPITTLNFGKSAVDESLPSFLGIYNGKLSEISLKNFVESADFILMLGVKLTDSSTGAFTHHLDENKMISLNIDEGIIFNKVVEDFDFRAVVHSLSELKGIEYEGQYIDKQYEEFIPSSAPLSQDRLWQAVESLTQSNETIVAEQGTSFFGASTIFLKSNSRFIGQPLWGSIGYTFPAALGSQIADKESRHLLFIGDGSLQLTVQELGLSIREKLNPICFIINNDGYTVEREIHGPTQSYNDIPMWNYSKLPETFGATEDRVVSKIVRTENEFVSVMKEAQADVNRMYWIELVLEKEDAPKLLKKMGKLFAEQNK

SEQ ID NO: 415 - DNA, 1641 bp, Artificial Sequence
  Variant of branched-chain keto acid decarboxylase (kdcA) from Lactococcus lactis
atgtacaccgttggcgactatctgctggaccgtctgcatgaactgggaattgaagaaatctttggcgtgccgggcgattacaatctgcaattcctggatcaaatcattagccgcgaagatatgaaatggattggtaacgcgaatgaactgaatgcgagctacatggctgatggctatgcacgtacgaagaaggcggcggcgttcctgacgaccttcggtgttggtgaactgagcgcaatcaatgggttggcgggcagctatgcagagaacctgccagtcgtggaaatcgttgggagtccgacctcgaaggtgcagaacgatggcaagttcgttcatcacaccctggccgacggcgacttcaagcacttcatgaagatgcacgaaccggtcaccgctgcacgtacactgctgaccgccgagaacgcgacctatgagattgaccgcgtgctgagccaactgctgaaagaacgtaaacctgtgtacatcaacctgccggttgatgtcgccgcggcgaaagccgagaaaccagctctgagcctggagaaagaaagcagcacgaccaacaccacagaacaggtgatcctgtcgaagatcgaagaaagcctgaagaacgcccagaaaccggtcgtgatcgctgggcacgaggtgattagcttcggtctggagaagacggttacgcagtttgtgagtgaaaccaaactgccgattactaccctgaactttggcaaatcggctgtggatgaatccctgccgtccttcctgggtatctacaatggtaaactgagcgagattagcctcaagaactttgtggaaagcgcagacttcatcctgatgcttggtgtgaaactgacggatagcagtacgggcgcgtttacgcaccatctggacgagaacaagatgattagcctgaacattgatgaaggcatcatcttcaacaaagtcgtagaagacttcgatttccgtgcggttgttagcagcctgagcgagctgaaaggcattgaatacgaaggtcagtacattgataagcagtacgaagagttcattccgagcagcattccactgagccaagaccgtctgtggcaagcagtagaatctctgacacagtccaatgaaaccattgtggcggaacagggcacgtcgttcttcggtgcctccaccatcttcctgaagagcaattcacgcttcatcggtcagccgctttggggcagcatcggctatacgtttccggcagcactgggatcacagattgcggataaggaaagtcgccatctgctgttcattggtgatggtagcctgcaactgaccgtgcaggagctgggcctgtcgatccgtgagaaactgaacccgatttgtttcatcatcaacaacgatggctataccgtagagcgcgagattcatgggcctacacagagctacaatgacatcccgatgtggaactatagcaaactgccggaaacctttggcgcgacggaagatcgcgtagttagcaagatcgttcgcacagagaacgagtttgtgagtgtcatgaaagaagcgcaggccgatgttaaccgcatgtattggattgaactggttctggagaaagaagatgcaccgaaactgctgaagaagatggggaagctgtttgcagaacagaacaaa

SEQ ID NO: 416 - protein, 547 aa, Artificial Sequence
  Variant of branched-chain keto acid decarboxylase (kdcA) from Lactococcus lactis
MYTVGDYLLDRLHELGIEEIFGVPGDYNLQFLDQIISREDMKWIGNANELNASYMADGYARTKKAAAFLTTFGVGELSAINGLAGSYAENLPVVEIVGSPTSKVQNDGKFVHHTLADGDFKHFMKMHEPVTAARTLLTAENATYEIDRVLSQLLKERKPVYINLPVDVAAAKAEKPALSLEKESSTTNTTEQVILSKIEESLKNAQKPVVIAGHEVISFGLEKTVTQFVSETKLPITTLNFGKSAVDESLPSFLGIYNGKLSEISLKNFVESADFILMLGVKLTDSSTGAFTHHLDENKMISLNIDEGIIFNKVVEDFDFRAVVSSLSELKGIEYEGQYIDKQYEEFIPSSIPLSQDRLWQAVESLTQSNETIVAEQGTSFFGASTIFLKSNSRFIGQPLWGSIGYTFPAALGSQIADKESRHLLFIGDGSLQLTVQELGLSIREKLNPICFIINNDGYTVEREIHGPTQSYNDIPMWNYSKLPETFGATEDRVVSKIVRTENEFVSVMKEAQADVNRMYWIELVLEKEDAPKLLKKMGKLFAEQNK

SEQ ID NO: 417 - DNA, 1641 bp, Artificial Sequence
  Variant of branched-chain keto acid decarboxylase (kdcA) from Lactococcus lactis
atgtacaccgttggcgactatctgctggaccgtctgcatgaactgggaattgaagaaatctttggcgtgccgggcgattacaatctgcaattcctggatcaaatcattagccgcgaagatatgaaatggattggtaacgcgaatgaactgaatgcgagctacatggctgatggctatgcacgtacgaagaaggcggcggcgttcctgacgaccttcggtgttggtgaactgagcgcaatcaatgggttggcgggcagctatgcagagaacctgccagtcgtggaaatcgttgggagtccgacctcgaaggtgcagaacgatggcaagttcgttcatcacaccctggccgacggcgacttcaagcacttcatgaagatgcacgaaccggtcaccgctgcacgtacactgctgaccgccgagaacgcgacctatgagattgaccgcgtgctgagccaactgctgaaagaacgtaaacctgtgtacatcaacctgccggttgatgtcgccgcggcgaaagccgagaaaccagctctgagcctggagaaagaaagcagcacgaccaacaccacagaacaggtgatcctgtcgaagatcgaagaaagcctgaagaacgcccagaaaccggtcgtgatcgctgggcacgaggtgattagcttcggtctggagaagacggttacgcagtttgtgagtgaaaccaaactgccgattactaccctgaactttggcaaatcggctgtggatgaatccctgccgtccttcctgggtatctacaatggtaaactgagcgagattagcctcaagaactttgtggaaagcgcagacttcatcctgatgcttggtgtgaaactgacggatagcagtacgggcgcgtttacgcaccatctggacgagaacaagatgattagcctgaacattgatgaaggcatcatcttcaacaaagtcgtagaagacttcgatttccgtgcggttgttagcagcctgagcgagctgaaaggcattgaatacgaaggtcagtacattgataagcagtacgaagagttcattccgagcagcgcagaactgagccaagaccgtctgtggcaagcagtagaatctctgacacagtccaatgaaaccattgtggcggaacagggcacgtcgttcttcggtgcctccaccatcttcctgaagagcaattcacgcttcatcggtcagccgctttggggcagcatcggctatacgtttccggcagcactgggatcacagattgcggataaggaaagtcgccatctgctgttcattggtgatggtagcctgcaactgaccgtgcaggagctgggcctgtcgatccgtgagaaactgaacccgatttgtttcatcatcaacaacgatggctataccgtagagcgcgagattcatgggcctacacagagctacaatgacatcccgatgtggaactatagcaaactgccggaaacctttggcgcgacggaagatcgcgtagttagcaagatcgttcgcacagagaacgagtttgtgagtgtcatgaaagaagcgcaggccgatgttaaccgcatgtattggattgaactggttctggagaaagaagatgcaccgaaactgctgaagaagatggggaagctgtttgcagaacagaacaaa

SEQ ID NO: 418 - protein, 547 aa, Artificial Sequence
  Variant of branched-chain keto acid decarboxylase (kdcA) from Lactococcus lactis
MYTVGDYLLDRLHELGIEEIFGVPGDYNLQFLDQIISREDMKWIGNANELNASYMADGYARTKKAAAFLTTFGVGELSAINGLAGSYAENLPVVEIVGSPTSKVQNDGKFVHHTLADGDFKHFMKMHEPVTAARTLLTAENATYEIDRVLSQLLKERKPVYINLPVDVAAAKAEKPALSLEKESSTTNTTEQVILSKIEESLKNAQKPVVIAGHEVISFGLEKTVTQFVSETKLPITTLNFGKSAVDESLPSFLGIYNGKLSEISLKNFVESADFILMLGVKLTDSSTGAFTHHLDENKMISLNIDEGIIFNKVVEDFDFRAVVSSLSELKGIEYEGQYIDKQYEEFIPSSAELSQDRLWQAVESLTQSNETIVAEQGTSFFGASTIFLKSNSRFIGQPLWGSIGYTFPAALGSQIADKESRHLLFIGDGSLQLTVQELGLSIREKLNPICFIINNDGYTVEREIHGPTQSYNDIPMWNYSKLPETFGATEDRVVSKIVRTENEFVSVMKEAQADVNRMYWIELVLEKEDAPKLLKKMGKLFAEQNK

SEQ ID NO: 419 - DNA, 1641 bp, Artificial Sequence
  Variant of branched-chain keto acid decarboxylase (kdcA) from Lactococcus lactis
atgtacaccgttggcgactatctgctggaccgtctgcatgaactgggaattgaagaaatctttggcgtgccgggcgattacaatctgcaattcctggatcaaatcattagccgcgaagatatgaaatggattggtaacgcgaatgaactgaatgcgagctacatggctgatggctatgcacgtacgaagaaggcggcggcgttcctgacgaccttcggtgttggtgaactgagcgcaatcaatgggttggcgggcagctatgcagagaacctgccagtcgtggaaatcgttgggagtccgacctcgaaggtgcagaacgatggcaagttcgttcatcacaccctggccgacggcgacttcaagcacttcatgaagatgcacgaaccggtcaccgctgcacgtacactgctgaccgccgagaacgcgacctatgagattgaccgcgtgctgagccaactgctgaaagaacgtaaacctgtgtacatcaacctgccggttgatgtcgccgcggcgaaagccgagaaaccagctctgagcctggagaaagaaagcagcacgaccaacaccacagaacaggtgatcctgtcgaagatcgaagaaagcctgaagaacgcccagaaaccggtcgtgatcgctgggcacgaggtgattagcttcggtctggagaagacggttacgcagtttgtgagtgaaaccaaactgccgattactaccctgaactttggcaaatcggctgtggatgaatccctgccgtccttcctgggtatctacaatggtaaactgagcgagattagcctcaagaactttgtggaaagcgcagacttcatcctgatgcttggtgtgaaactgacggatagcagtacgggcgcgtttacgcaccatctggacgagaacaagatgattagcctgaacattgatgaaggcatcatcttcaacaaagtcgtagaagacttcgatttccgtgcggttgttagcagcctgagcgagctgaaaggcattgaatacgaaggtcagtacattgataagcagtacgaagagttcattccgagcagcgcaccactggaacaagaccgtctgtggcaagcagtagaatctctgacacagtccaatgaaaccattgtggcggaacagggcacgtcgttcttcggtgcctccaccatcttcctgaagagcaattcacgcttcatcggtcagccgctttggggcagcatcggctatacgtttccggcagcactgggatcacagattgcggataaggaaagtcgccatctgctgttcattggtgatggtagcctgcaactgaccgtgcaggagctgggcctgtcgatccgtgagaaactgaacccgatttgtttcatcatcaacaacgatggctataccgtagagcgcgagattcatgggcctacacagagctacaatgacatcccgatgtggaactatagcaaactgccggaaacctttggcgcgacggaagatcgcgtagttagcaagatcgttcgcacagagaacgagtttgtgagtgtcatgaaagaagcgcaggccgatgttaaccgcatgtattggattgaactggttctggagaaagaagatgcaccgaaactgctgaagaagatggggaagctgtttgcagaacagaacaaa

SEQ ID NO: 420 - protein, 547 aa, Artificial Sequence
  Variant of branched-chain keto acid decarboxylase (kdcA) from Lactococcus lactis
MYTVGDYLLDRLHELGIEEIFGVPGDYNLQFLDQIISREDMKWIGNANELNASYMADGYARTKKAAAFLTTFGVGELSAINGLAGSYAENLPVVEIVGSPTSKVQNDGKFVHHTLADGDFKHFMKMHEPVTAARTLLTAENATYEIDRVLSQLLKERKPVYINLPVDVAAAKAEKPALSLEKESSTTNTTEQVILSKIEESLKNAQKPVVIAGHEVISFGLEKTVTQFVSETKLPITTLNFGKSAVDESLPSFLGIYNGKLSEISLKNFVESADFILMLGVKLTDSSTGAFTHHLDENKMISLNIDEGIIFNKVVEDFDFRAVVSSLSELKGIEYEGQYIDKQYEEFIPSSAPLEQDRLWQAVESLTQSNETIVAEQGTSFFGASTIFLKSNSRFIGQPLWGSIGYTFPAALGSQIADKESRHLLFIGDGSLQLTVQELGLSIREKLNPICFIINNDGYTVEREIHGPTQSYNDIPMWNYSKLPETFGATEDRVVSKIVRTENEFVSVMKEAQADVNRMYWIELVLEKEDAPKLLKKMGKLFAEQNK

SEQ ID NO: 421 - DNA, 1641 bp, Artificial Sequence
  Variant of branched-chain keto acid decarboxylase (kdcA) from Lactococcus lactis
atgtacaccgttggcgactatctgctggaccgtctgcatgaactgggaattgaagaaatctttggcgtgccgggcgattacaatctgcaattcctggatcaaatcattagccgcgaagatatgaaatggattggtaacgcgaatgaactgaatgcgagctacatggctgatggctatgcacgtacgaagaaggcggcggcgttcctgacgaccttcggtgttggtgaactgagcgcaatcaatgggttggcgggcagctatgcagagaacctgccagtcgtggaaatcgttgggagtccgacctcgaaggtgcagaacgatggcaagttcgttcatcacaccctggccgacggcgacttcaagcacttcatgaagatgcacgaaccggtcaccgctgcacgtacactgctgaccgccgagaacgcgacctatgagattgaccgcgtgctgagccaactgctgaaagaacgtaaacctgtgtacatcaacctgccggttgatgtcgccgcggcgaaagccgagaaaccagctctgagcctggagaaagaaagcagcacgaccaacaccacagaacaggtgatcctgtcgaagatcgaagaaagcctgaagaacgcccagaaaccggtcgtgatcgctgggcacgaggtgattagcttcggtctggagaagacggttacgcagtttgtgagtgaaaccaaactgccgattactaccctgaactttggcaaatcggctgtggatgaatccctgccgtccttcctgggtatctacaatggtaaactgagcgagattagcctcaagaactttgtggaaagcgcagacttcatcctgatgcttggtgtgaaactgacggatagcagtacgggcgcgtttacgcaccatctggacgagaacaagatgattagcctgaacattgatgaaggcatcatcttcaacaaagtcgtagaagacttcgatttccgtgcggttgttagcagcctgagcgagctgaaaggcattgaatacgaaggtcagtacattgataagcagtacgaagagttcattccgagcagctggccactgagccaagaccgtctgtggcaagcagtagaatctctgacacagtccaatgaaaccattgtggcggaacagggcacgtcgttcttcggtgcctccaccatcttcctgaagagcaattcacgcttcatcggtcagccgctttggggcagcatcggctatacgtttccggcagcactgggatcacagattgcggataaggaaagtcgccatctgctgttcattggtgatggtagcctgcaactgaccgtgcaggagctgggcctgtcgatccgtgagaaactgaacccgatttgtttcatcatcaacaacgatggctataccgtagagcgcgagattcatgggcctacacagagctacaatgacatcccgatgtggaactatagcaaactgccggaaacctttggcgcgacggaagatcgcgtagttagcaagatcgttcgcacagagaacgagtttgtgagtgtcatgaaagaagcgcaggccgatgttaaccgcatgtattggattgaactggttctggagaaagaagatgcaccgaaactgctgaagaagatggggaagctgtttgcagaacagaacaaa

SEQ ID NO: 422 - protein, 547 aa, Artificial Sequence
  Variant of branched-chain keto acid decarboxylase (kdcA) from Lactococcus lactis
MYTVGDYLLDRLHELGIEEIFGVPGDYNLQFLDQIISREDMKWIGNANELNASYMADGYARTKKAAAFLTTFGVGELSAINGLAGSYAENLPVVEIVGSPTSKVQNDGKFVHHTLADGDFKHFMKMHEPVTAARTLLTAENATYEIDRVLSQLLKERKPVYINLPVDVAAAKAEKPALSLEKESSTTNTTEQVILSKIEESLKNAQKPVVIAGHEVISFGLEKTVTQFVSETKLPITTLNFGKSAVDESLPSFLGIYNGKLSEISLKNFVESADFILMLGVKLTDSSTGAFTHHLDENKMISLNIDEGIIFNKVVEDFDFRAVVSSLSELKGIEYEGQYIDKQYEEFIPSSWPLSQDRLWQAVESLTQSNETIVAEQGTSFFGASTIFLKSNSRFIGQPLWGSIGYTFPAALGSQIADKESRHLLFIGDGSLQLTVQELGLSIREKLNPICFIINNDGYTVEREIHGPTQSYNDIPMWNYSKLPETFGATEDRVVSKIVRTENEFVSVMKEAQADVNRMYWIELVLEKEDAPKLLKKMGKLFAEQNK

SEQ ID NO: 423 - DNA, 1641 bp, Artificial Sequence
  Variant of branched-chain keto acid decarboxylase (kdcA) from Lactococcus lactis
atgtacaccgttggcgactatctgctggaccgtctgcatgaactgggaattgaagaaatctttggcgtgccgggcgattacaatctgcaattcctggatcaaatcattagccgcgaagatatgaaatggattggtaacgcgaatgaactgaatgcgagctacatggctgatggctatgcacgtacgaagaaggcggcggcgttcctgacgaccttcggtgttggtgaactgagcgcaatcaatgggttggcgggcagctatgcagagaacctgccagtcgtggaaatcgttgggagtccgacctcgaaggtgcagaacgatggcaagttcgttcatcacaccctggccgacggcgacttcaagcacttcatgaagatgcacgaaccggtcaccgctgcacgtacactgctgaccgccgagaacgcgacctatgagattgaccgcgtgctgagccaactgctgaaagaacgtaaacctgtgtacatcaacctgccggttgatgtcgccgcggcgaaagccgagaaaccagctctgagcctggagaaagaaagcagcacgaccaacaccacagaacaggtgatcctgtcgaagatcgaagaaagcctgaagaacgcccagaaaccggtcgtgatcgctgggcacgaggtgattagcttcggtctggagaagacggttacgcagtttgtgagtgaaaccaaactgccgattactaccctgaactttggcaaatcggctgtggatgaatccctgccgtccttcctgggtatctacaatggtaaactgagcgagattagcctcaagaactttgtggaaagcgcagacttcatcctgatgcttggtgtgaaactgacggatagcagtacgggcgcgtttacgcaccatctggacgagaacaagatgattagcctgaacattgatgaaggcatcatcttcaacaaagtcgtagaagacttcgatttccgtgcggttgttagcagcctgagcgagctgaaaggcattgaatacgaaggtcagtacattgataagcagtacgaagagttcattccgtatagcgcaccactgagccaagaccgtctgtggcaagcagtagaatctctgacacagtccaatgaaaccattgtggcggaacagggcacgtcgttcttcggtgcctccaccatcttcctgaagagcaattcacgcttcatcggtcagccgctttggggcagcatcggctatacgtttccggcagcactgggatcacagattgcggataaggaaagtcgccatctgctgttcattggtgatggtagcctgcaactgaccgtgcaggagctgggcctgtcgatccgtgagaaactgaacccgatttgtttcatcatcaacaacgatggctataccgtagagcgcgagattcatgggcctacacagagctacaatgacatcccgatgtggaactatagcaaactgccggaaacctttggcgcgacggaagatcgcgtagttagcaagatcgttcgcacagagaacgagtttgtgagtgtcatgaaagaagcgcaggccgatgttaaccgcatgtattggattgaactggttctggagaaagaagatgcaccgaaactgctgaagaagatggggaagctgtttgcagaacagaacaaa

SEQ ID NO: 424 - protein, 547 aa, Artificial Sequence
  Variant of branched-chain keto acid decarboxylase (kdcA) from Lactococcus lactis
MYTVGDYLLDRLHELGIEEIFGVPGDYNLQFLDQIISREDMKWIGNANELNASYMADGYARTKKAAAFLTTFGVGELSAINGLAGSYAENLPVVEIVGSPTSKVQNDGKFVHHTLADGDFKHFMKMHEPVTAARTLLTAENATYEIDRVLSQLLKERKPVYINLPVDVAAAKAEKPALSLEKESSTTNTTEQVILSKIEESLKNAQKPVVIAGHEVISFGLEKTVTQFVSETKLPITTLNFGKSAVDESLPSFLGIYNGKLSEISLKNFVESADFILMLGVKLTDSSTGAFTHHLDENKMISLNIDEGIIFNKVVEDFDFRAVVSSLSELKGIEYEGQYIDKQYEEFIPYSAPLSQDRLWQAVESLTQSNETIVAEQGTSFFGASTIFLKSNSRFIGQPLWGSIGYTFPAALGSQIADKESRHLLFIGDGSLQLTVQELGLSIREKLNPICFIINNDGYTVEREIHGPTQSYNDIPMWNYSKLPETFGATEDRVVSKIVRTENEFVSVMKEAQADVNRMYWIELVLEKEDAPKLLKKMGKLFAEQNK

SEQ ID NO: 425 - DNA, 1641 bp, Artificial Sequence
  Variant of branched-chain keto acid decarboxylase (kdcA) from Lactococcus lactis
atgtacaccgttggcgactatctgctggaccgtctgcatgaactgggaattgaagaaatctttggcgtgccgggcgattacaatctgcaattcctggatcaaatcattagccgcgaagatatgaaatggattggtaacgcgaatgaactgaatgcgagctacatggctgatggctatgcacgtacgaagaaggcggcggcgttcctgacgaccttcggtgttggtgaactgagcgcaatcaatgggttggcgggcagctatgcagagaacctgccagtcgtggaaatcgttgggagtccgacctcgaaggtgcagaacgatggcaagttcgttcatcacaccctggccgacggcgacttcaagcacttcatgaagatgcacgaaccggtcaccgctgcacgtacactgctgaccgccgagaacgcgacctatgagattgaccgcgtgctgagccaactgctgaaagaacgtaaacctgtgtacatcaacctgccggttgatgtcgccgcggcgaaagccgagaaaccagctctgagcctggagaaagaaagcagcacgaccaacaccacagaacaggtgatcctgtcgaagatcgaagaaagcctgaagaacgcccagaaaccggtcgtgatcgctgggcacgaggtgattagcttcggtctggagaagacggttacgcagtttgtgagtgaaaccaaactgccgattactaccctgaactttggcaaatcggctgtggatgaatccctgccgtccttcctgggtatctacaatggtaaactgagcgagattagcctcaagaactttgtggaaagcgcagacttcatcctgatgcttggtgtgaaactgacggatagcagtacgggcgcgtttacgcaccatctggacgagaacaagatgattagcctgaacattgatgaaggcatcatcttcaacaaagtcgtagaagacttcgatttccgtgcggttgttagcagcctgagcgagctgaaaggcattgaatacgaaggtcagtacattgataagcagtacgaagagatgattccgagcagcgcaccactgagccaagaccgtctgtggcaagcagtagaatctctgacacagtccaatgaaaccattgtggcggaacagggcacgtcgttcttcggtgcctccaccatcttcctgaagagcaattcacgcttcatcggtcagccgctttggggcagcatcggctatacgtttccggcagcactgggatcacagattgcggataaggaaagtcgccatctgctgttcattggtgatggtagcctgcaactgaccgtgcaggagctgggcctgtcgatccgtgagaaactgaacccgatttgtttcatcatcaacaacgatggctataccgtagagcgcgagattcatgggcctacacagagctacaatgacatcccgatgtggaactatagcaaactgccggaaacctttggcgcgacggaagatcgcgtagttagcaagatcgttcgcacagagaacgagtttgtgagtgtcatgaaagaagcgcaggccgatgttaaccgcatgtattggattgaactggttctggagaaagaagatgcaccgaaactgctgaagaagatggggaagctgtttgcagaacagaacaaa

SEQ ID NO: 426 - protein, 547 aa, Artificial Sequence
  Variant of branched-chain keto acid decarboxylase (kdcA) from Lactococcus lactis
MYTVGDYLLDRLHELGIEEIFGVPGDYNLQFLDQIISREDMKWIGNANELNASYMADGYARTKKAAAFLTTFGVGELSAINGLAGSYAENLPVVEIVGSPTSKVQNDGKFVHHTLADGDFKHFMKMHEPVTAARTLLTAENATYEIDRVLSQLLKERKPVYINLPVDVAAAKAEKPALSLEKESSTTNTTEQVILSKIEESLKNAQKPVVIAGHEVISFGLEKTVTQFVSETKLPITTLNFGKSAVDESLPSFLGIYNGKLSEISLKNFVESADFILMLGVKLTDSSTGAFTHHLDENKMISLNIDEGIIFNKVVEDFDFRAVVSSLSELKGIEYEGQYIDKQYEEMIPSSAPLSQDRLWQAVESLTQSNETIVAEQGTSFFGASTIFLKSNSRFIGQPLWGSIGYTFPAALGSQIADKESRHLLFIGDGSLQLTVQELGLSIREKLNPICFIINNDGYTVEREIHGPTQSYNDIPMWNYSKLPETFGATEDRVVSKIVRTENEFVSVMKEAQADVNRMYWIELVLEKEDAPKLLKKMGKLFAEQNK

SEQ ID NO: 427 - DNA, 1641 bp, Artificial Sequence
  Variant of branched-chain keto acid decarboxylase (kdcA) from Lactococcus lactis
atgtacaccgttggcgactatctgctggaccgtctgcatgaactgggaattgaagaaatctttggcgtgccgggcgattacaatctgcaattcctggatcaaatcattagccgcgaagatatgaaatggattggtaacgcgaatgaactgaatgcgagctacatggctgatggctatgcacgtacgaagaaggcggcggcgttcctgacgaccttcggtgttggtgaactgagcgcaatcaatgggttggcgggcagctatgcagagaacctgccagtcgtggaaatcgttgggagtccgacctcgaaggtgcagaacgatggcaagttcgttcatcacaccctggccgacggcgacttcaagcacttcatgaagatgcacgaaccggtcaccgctgcacgtacactgctgaccgccgagaacgcgacctatgagattgaccgcgtgctgagccaactgctgaaagaacgtaaacctgtgtacatcaacctgccggttgatgtcgccgcggcgaaagccgagaaaccagctctgagcctggagaaagaaagcagcacgaccaacaccacagaacaggtgatcctgtcgaagatcgaagaaagcctgaagaacgcccagaaaccggtcgtgatcgctgggcacgaggtgattagcttcggtctggagaagacggttacgcagtttgtgagtgaaaccaaactgccgattactaccctgaactttggcaaatcggctgtggatgaatccctgccgtccttcctgggtatctacaatggtaaactgagcgagattagcctcaagaactttgtggaaagcgcagacttcatcctgatgcttggtgtgaaactgacggatagcagtacgggcgcgtttacgcaccatctggacgagaacaagatgattagcctgaacattgatgaaggcatcatcttcaacaaagtcgtagaagacttcgatttccgtgcggttgttagcagcctgagcgagctgaaaggcattgaatacgaaggtcagtacattgataagcagtacgaagagttcattccgagcagcgcaccactgtggcaagaccgtctgtggcaagcagtagaatctctgacacagtccaatgaaaccattgtggcggaacagggcacgtcgttcttcggtgcctccaccatcttcctgaagagcaattcacgcttcatcggtcagccgctttggggcagcatcggctatacgtttccggcagcactgggatcacagattgcggataaggaaagtcgccatctgctgttcattggtgatggtagcctgcaactgaccgtgcaggagctgggcctgtcgatccgtgagaaactgaacccgatttgtttcatcatcaacaacgatggctataccgtagagcgcgagattcatgggcctacacagagctacaatgacatcccgatgtggaactatagcaaactgccggaaacctttggcgcgacggaagatcgcgtagttagcaagatcgttcgcacagagaacgagtttgtgagtgtcatgaaagaagcgcaggccgatgttaaccgcatgtattggattgaactggttctggagaaagaagatgcaccgaaactgctgaagaagatggggaagctgtttgcagaacagaacaaa

SEQ ID NO: 428 - protein, 547 aa, Artificial Sequence
  Variant of branched-chain keto acid decarboxylase (kdcA) from Lactococcus lactis
MYTVGDYLLDRLHELGIEEIFGVPGDYNLQFLDQIISREDMKWIGNANELNASYMADGYARTKKAAAFLTTFGVGELSAINGLAGSYAENLPVVEIVGSPTSKVQNDGKFVHHTLADGDFKHFMKMHEPVTAARTLLTAENATYEIDRVLSQLLKERKPVYINLPVDVAAAKAEKPALSLEKESSTTNTTEQVILSKIEESLKNAQKPVVIAGHEVISFGLEKTVTQFVSETKLPITTLNFGKSAVDESLPSFLGIYNGKLSEISLKNFVESADFILMLGVKLTDSSTGAFTHHLDENKMISLNIDEGIIFNKVVEDFDFRAVVSSLSELKGIEYEGQYIDKQYEEFIPSSAPLWQDRLWQAVESLTQSNETIVAEQGTSFFGASTIFLKSNSRFIGQPLWGSIGYTFPAALGSQIADKESRHLLFIGDGSLQLTVQELGLSIREKLNPICFIINNDGYTVEREIHGPTQSYNDIPMWNYSKLPETFGATEDRVVSKIVRTENEFVSVMKEAQADVNRMYWIELVLEKEDAPKLLKKMGKLFAEQNK

SEQ ID NO: 429 - DNA, 1641 bp, Artificial Sequence
  Variant of branched-chain keto acid decarboxylase (kdcA) from Lactococcus lactis
atgtacaccgttggcgactatctgctggaccgtctgcatgaactgggaattgaagaaatctttggcgtgccgggcgattacaatctgcaattcctggatcaaatcattagccgcgaagatatgaaatggattggtaacgcgaatgaactgaatgcgagctacatggctgatggctatgcacgtacgaagaaggcggcggcgttcctgacgaccttcggtgttggtgaactgagcgcaatcaatgggttggcgggcagctatgcagagaacctgccagtcgtggaaatcgttgggagtccgacctcgaaggtgcagaacgatggcaagttcgttcatcacaccctggccgacggcgacttcaagcacttcatgaagatgcacgaaccggtcaccgctgcacgtacactgctgaccgccgagaacgcgacctatgagattgaccgcgtgctgagccaactgctgaaagaacgtaaacctgtgtacatcaacctgccggttgatgtcgccgcggcgaaagccgagaaaccagctctgagcctggagaaagaaagcagcacgaccaacaccacagaacaggtgatcctgtcgaagatcgaagaaagcctgaagaacgcccagaaaccggtcgtgatcgctgggcacgaggtgattagcttcggtctggagaagacggttacgcagtttgtgagtgaaaccaaactgccgattactaccctgaactttggcaaatcggctgtggatgaatccctgccgtccttcctgggtatctacaatggtaaactgagcgagattagcctcaagaactttgtggaaagcgcagacttcatcctgatgcttggtgtgaaactgacggatagcagtacgggcgcgtttacgcaccatctggacgagaacaagatgattagcctgaacattgatgaaggcatcatcttcaacaaagtcgtagaagacttcgatttccgtgcggttgttagcagcctgagcgagctgaaaggcattgaatacgaaggtcagtacattgataagcagtacgaagagttctgtccgagcagcgcaccactgagccaagaccgtctgtggcaagcagtagaatctctgacacagtccaatgaaaccattgtggcggaacagggcacgtcgttcttcggtgcctccaccatcttcctgaagagcaattcacgcttcatcggtcagccgctttggggcagcatcggctatacgtttccggcagcactgggatcacagattgcggataaggaaagtcgccatctgctgttcattggtgatggtagcctgcaactgaccgtgcaggagctgggcctgtcgatccgtgagaaactgaacccgatttgtttcatcatcaacaacgatggctataccgtagagcgcgagattcatgggcctacacagagctacaatgacatcccgatgtggaactatagcaaactgccggaaacctttggcgcgacggaagatcgcgtagttagcaagatcgttcgcacagagaacgagtttgtgagtgtcatgaaagaagcgcaggccgatgttaaccgcatgtattggattgaactggttctggagaaagaagatgcaccgaaactgctgaagaagatggggaagctgtttgcagaacagaacaaa

SEQ ID NO: 430 - protein, 547 aa, Artificial Sequence
  Variant of branched-chain keto acid decarboxylase (kdcA) from Lactococcus lactis
MYTVGDYLLDRLHELGIEEIFGVPGDYNLQFLDQIISREDMKWIGNANELNASYMADGYARTKKAAAFLTTFGVGELSAINGLAGSYAENLPVVEIVGSPTSKVQNDGKFVHHTLADGDFKHFMKMHEPVTAARTLLTAENATYEIDRVLSQLLKERKPVYINLPVDVAAAKAEKPALSLEKESSTTNTTEQVILSKIEESLKNAQKPVVIAGHEVISFGLEKTVTQFVSETKLPITTLNFGKSAVDESLPSFLGIYNGKLSEISLKNFVESADFILMLGVKLTDSSTGAFTHHLDENKMISLNIDEGIIFNKVVEDFDFRAVVSSLSELKGIEYEGQYIDKQYEEFCPSSAPLSQDRLWQAVESLTQSNETIVAEQGTSFFGASTIFLKSNSRFIGQPLWGSIGYTFPAALGSQIADKESRHLLFIGDGSLQLTVQELGLSIREKLNPICFIINNDGYTVEREIHGPTQSYNDIPMWNYSKLPETFGATEDRVVSKIVRTENEFVSVMKEAQADVNRMYWIELVLEKEDAPKLLKKMGKLFAEQNK

SEQ ID NO: 431 - DNA, 1641 bp, Artificial Sequence
  Variant of branched-chain keto acid decarboxylase (kdcA) from Lactococcus lactis
atgtacaccgttggcgactatctgctggaccgtctgcatgaactgggaattgaagaaatctttggcgtgccgggcgattacaatctgcaattcctggatcaaatcattagccgcgaagatatgaaatggattggtaacgcgaatgaactgaatgcgagctacatggctgatggctatgcacgtacgaagaaggcggcggcgttcctgacgaccttcggtgttggtgaactgagcgcaatcaatgggttggcgggcagctatgcagagaacctgccagtcgtggaaatcgttgggagtccgacctcgaaggtgcagaacgatggcaagttcgttcatcacaccctggccgacggcgacttcaagcacttcatgaagatgcacgaaccggtcaccgctgcacgtacactgctgaccgccgagaacgcgacctatgagattgaccgcgtgctgagccaactgctgaaagaacgtaaacctgtgtacatcaacctgccggttgatgtcgccgcggcgaaagccgagaaaccagctctgagcctggagaaagaaagcagcacgaccaacaccacagaacaggtgatcctgtcgaagatcgaagaaagcctgaagaacgcccagaaaccggtcgtgatcgctgggcacgaggtgattagcttcggtctggagaagacggttacgcagtttgtgagtgaaaccaaactgccgattactaccctgaactttggcaaatcggctgtggatgaatccctgccgtccttcctgggtatctacaatggtaaactgagcgagattagcctcaagaactttgtggaaagcgcagacttcatcctgatgcttggtgtgaaactgacggatagcagtacgggcgcgtttacgcaccatctggacgagaacaagatgattagcctgaacattgatgaaggcatcatcttcaacaaagtcgtagaagacttcgatttccgtgcggttgttagcagcctgagcgagctgaaaggcattgaatacgaaggtcagtacattgataagcagtacgaagagttcattccgagcagcgcaccactgaaacaagaccgtctgtggcaagcagtagaatctctgacacagtccaatgaaaccattgtggcggaacagggcacgtcgttcttcggtgcctccaccatcttcctgaagagcaattcacgcttcatcggtcagccgctttggggcagcatcggctatacgtttccggcagcactgggatcacagattgcggataaggaaagtcgccatctgctgttcattggtgatggtagcctgcaactgaccgtgcaggagctgggcctgtcgatccgtgagaaactgaacccgatttgtttcatcatcaacaacgatggctataccgtagagcgcgagattcatgggcctacacagagctacaatgacatcccgatgtggaactatagcaaactgccggaaacctttggcgcgacggaagatcgcgtagttagcaagatcgttcgcacagagaacgagtttgtgagtgtcatgaaagaagcgcaggccgatgttaaccgcatgtattggattgaactggttctggagaaagaagatgcaccgaaactgctgaagaagatggggaagctgtttgcagaacagaacaaa

SEQ ID NO: 432 - protein, 547 aa, Artificial Sequence
  Variant of branched-chain keto acid decarboxylase (kdcA) from Lactococcus lactis
MYTVGDYLLDRLHELGIEEIFGVPGDYNLQFLDQIISREDMKWIGNANELNASYMADGYARTKKAAAFLTTFGVGELSAINGLAGSYAENLPVVEIVGSPTSKVQNDGKFVHHTLADGDFKHFMKMHEPVTAARTLLTAENATYEIDRVLSQLLKERKPVYINLPVDVAAAKAEKPALSLEKESSTTNTTEQVILSKIEESLKNAQKPVVIAGHEVISFGLEKTVTQFVSETKLPITTLNFGKSAVDESLPSFLGIYNGKLSEISLKNFVESADFILMLGVKLTDSSTGAFTHHLDENKMISLNIDEGIIFNKVVEDFDFRAVVSSLSELKGIEYEGQYIDKQYEEFIPSSAPLKQDRLWQAVESLTQSNETIVAEQGTSFFGASTIFLKSNSRFIGQPLWGSIGYTFPAALGSQIADKESRHLLFIGDGSLQLTVQELGLSIREKLNPICFIINNDGYTVEREIHGPTQSYNDIPMWNYSKLPETFGATEDRVVSKIVRTENEFVSVMKEAQADVNRMYWIELVLEKEDAPKLLKKMGKLFAEQNK

SEQ ID NO: 433 - DNA, 1641 bp, Artificial Sequence
  Variant of branched-chain keto acid decarboxylase (kdcA) from Lactococcus lactis
atgtacaccgttggcgactatctgctggaccgtctgcatgaactgggaattgaagaaatctttggcgtgccgggcgattacaatctgcaattcctggatcaaatcattagccgcgaagatatgaaatggattggtaacgcgaatgaactgaatgcgagctacatggctgatggctatgcacgtacgaagaaggcggcggcgttcctgacgaccttcggtgttggtgaactgagcgcaatcaatgggttggcgggcagctatgcagagaacctgccagtcgtggaaatcgttgggagtccgacctcgaaggtgcagaacgatggcaagttcgttcatcacaccctggccgacggcgacttcaagcacttcatgaagatgcacgaaccggtcaccgctgcacgtacactgctgaccgccgagaacgcgacctatgagattgaccgcgtgctgagccaactgctgaaagaacgtaaacctgtgtacatcaacctgccggttgatgtcgccgcggcgaaagccgagaaaccagctctgagcctggagaaagaaagcagcacgaccaacaccacagaacaggtgatcctgtcgaagatcgaagaaagcctgaagaacgcccagaaaccggtcgtgatcgctgggcacgaggtgattagcttcggtctggagaagacggttacgcagtttgtgagtgaaaccaaactgccgattactaccctgaactttggcaaatcggctgtggatgaatccctgccgtccttcctgggtatctacaatggtaaactgagcgagattagcctcaagaactttgtggaaagcgcagacttcatcctgatgcttggtgtgaaactgacggatagcagtacgggcgcgtttacgcaccatctggacgagaacaagatgattagcctgaacattgatgaaggcatcatcttcaacaaagtcgtagaagacttcgatttccgtgcggttgttagcagcctgagcgagctgaaaggcattgaatacgaaggtcagtacattgataagcagtacgaagagttcattccgacaagcgcaccactgagccaagaccgtctgtggcaagcagtagaatctctgacacagtccaatgaaaccattgtggcggaacagggcacgtcgttcttcggtgcctccaccatcttcctgaagagcaattcacgcttcatcggtcagccgctttggggcagcatcggctatacgtttccggcagcactgggatcacagattgcggataaggaaagtcgccatctgctgttcattggtgatggtagcctgcaactgaccgtgcaggagctgggcctgtcgatccgtgagaaactgaacccgatttgtttcatcatcaacaacgatggctataccgtagagcgcgagattcatgggcctacacagagctacaatgacatcccgatgtggaactatagcaaactgccggaaacctttggcgcgacggaagatcgcgtagttagcaagatcgttcgcacagagaacgagtttgtgagtgtcatgaaagaagcgcaggccgatgttaaccgcatgtattggattgaactggttctggagaaagaagatgcaccgaaactgctgaagaagatggggaagctgtttgcagaacagaacaaa

SEQ ID NO: 434 - protein, 547 aa, Artificial Sequence
  Variant of branched-chain keto acid decarboxylase (kdcA) from Lactococcus lactis
MYTVGDYLLDRLHELGIEEIFGVPGDYNLQFLDQIISREDMKWIGNANELNASYMADGYARTKKAAAFLTTFGVGELSAINGLAGSYAENLPVVEIVGSPTSKVQNDGKFVHHTLADGDFKHFMKMHEPVTAARTLLTAENATYEIDRVLSQLLKERKPVYINLPVDVAAAKAEKPALSLEKESSTTNTTEQVILSKIEESLKNAQKPVVIAGHEVISFGLEKTVTQFVSETKLPITTLNFGKSAVDESLPSFLGIYNGKLSEISLKNFVESADFILMLGVKLTDSSTGAFTHHLDENKMISLNIDEGIIFNKVVEDFDFRAVVSSLSELKGIEYEGQYIDKQYEEFIPTSAPLSQDRLWQAVESLTQSNETIVAEQGTSFFGASTIFLKSNSRFIGQPLWGSIGYTFPAALGSQIADKESRHLLFIGDGSLQLTVQELGLSIREKLNPICFIINNDGYTVEREIHGPTQSYNDIPMWNYSKLPETFGATEDRVVSKIVRTENEFVSVMKEAQADVNRMYWIELVLEKEDAPKLLKKMGKLFAEQNK

SEQ ID NO: 435 - DNA, 1641 bp, Artificial Sequence
  Variant of branched-chain keto acid decarboxylase (kdcA) from Lactococcus lactis
atgtacaccgttggcgactatctgctggaccgtctgcatgaactgggaattgaagaaatctttggcgtgccgggcgattacaatctgcaattcctggatcaaatcattagccgcgaagatatgaaatggattggtaacgcgaatgaactgaatgcgagctacatggctgatggctatgcacgtacgaagaaggcggcggcgttcctgacgaccttcggtgttggtgaactgagcgcaatcaatgggttggcgggcagctatgcagagaacctgccagtcgtggaaatcgttgggagtccgacctcgaaggtgcagaacgatggcaagttcgttcatcacaccctggccgacggcgacttcaagcacttcatgaagatgcacgaaccggtcaccgctgcacgtacactgctgaccgccgagaacgcgacctatgagattgaccgcgtgctgagccaactgctgaaagaacgtaaacctgtgtacatcaacctgccggttgatgtcgccgcggcgaaagccgagaaaccagctctgagcctggagaaagaaagcagcacgaccaacaccacagaacaggtgatcctgtcgaagatcgaagaaagcctgaagaacgcccagaaaccggtcgtgatcgctgggcacgaggtgattagcttcggtctggagaagacggttacgcagtttgtgagtgaaaccaaactgccgattactaccctgaactttggcaaatcggctgtggatgaatccctgccgtccttcctgggtatctacaatggtaaactgagcgagattagcctcaagaactttgtggaaagcgcagacttcatcctgatgcttggtgtgaaactgacggatagcagtacgggcgcgtttacgcaccatctggacgagaacaagatgattagcctgaacattgatgaaggcatcatcttcaacaaagtcgtagaagacttcgatttccgtgcggttgttagcagcctgagcgagctgaaaggcattgaatacgaaggtcagtacattgataagcagtacgaagagttcattccgagcagcacaccactgagccaagaccgtctgtggcaagcagtagaatctctgacacagtccaatgaaaccattgtggcggaacagggcacgtcgttcttcggtgcctccaccatcttcctgaagagcaattcacgcttcatcggtcagccgctttggggcagcatcggctatacgtttccggcagcactgggatcacagattgcggataaggaaagtcgccatctgctgttcattggtgatggtagcctgcaactgaccgtgcaggagctgggcctgtcgatccgtgagaaactgaacccgatttgtttcatcatcaacaacgatggctataccgtagagcgcgagattcatgggcctacacagagctacaatgacatcccgatgtggaactatagcaaactgccggaaacctttggcgcgacggaagatcgcgtagttagcaagatcgttcgcacagagaacgagtttgtgagtgtcatgaaagaagcgcaggccgatgttaaccgcatgtattggattgaactggttctggagaaagaagatgcaccgaaactgctgaagaagatggggaagctgtttgcagaacagaacaaa

SEQ ID NO: 436 - protein, 547 aa, Artificial Sequence
  Variant of branched-chain keto acid decarboxylase (kdcA) from Lactococcus lactis
MYTVGDYLLDRLHELGIEEIFGVPGDYNLQFLDQIISREDMKWIGNANELNASYMADGYARTKKAAAFLTTFGVGELSAINGLAGSYAENLPVVEIVGSPTSKVQNDGKFVHHTLADGDFKHFMKMHEPVTAARTLLTAENATYEIDRVLSQLLKERKPVYINLPVDVAAAKAEKPALSLEKESSTTNTTEQVILSKIEESLKNAQKPVVIAGHEVISFGLEKTVTQFVSETKLPITTLNFGKSAVDESLPSFLGIYNGKLSEISLKNFVESADFILMLGVKLTDSSTGAFTHHLDENKMISLNIDEGIIFNKVVEDFDFRAVVSSLSELKGIEYEGQYIDKQYEEFIPSSTPLSQDRLWQAVESLTQSNETIVAEQGTSFFGASTIFLKSNSRFIGQPLWGSIGYTFPAALGSQIADKESRHLLFIGDGSLQLTVQELGLSIREKLNPICFIINNDGYTVEREIHGPTQSYNDIPMWNYSKLPETFGATEDRVVSKIVRTENEFVSVMKEAQADVNRMYWIELVLEKEDAPKLLKKMGKLFAEQNK

SEQ ID NO: 437 - DNA, 1641 bp, Artificial Sequence
  Variant of branched-chain keto acid decarboxylase (kdcA) from Lactococcus lactis
atgtacaccgttggcgactatctgctggaccgtctgcatgaactgggaattgaagaaatctttggcgtgccgggcgattacaatctgcaattcctggatcaaatcattagccgcgaagatatgaaatggattggtaacgcgaatgaactgaatgcgagctacatggctgatggctatgcacgtacgaagaaggcggcggcgttcctgacgaccttcggtgttggtgaactgagcgcaatcaatgggttggcgggcagctatgcagagaacctgccagtcgtggaaatcgttgggagtccgacctcgaaggtgcagaacgatggcaagttcgttcatcacaccctggccgacggcgacttcaagcacttcatgaagatgcacgaaccggtcaccgctgcacgtacactgctgaccgccgagaacgcgacctatgagattgaccgcgtgctgagccaactgctgaaagaacgtaaacctgtgtacatcaacctgccggttgatgtcgccgcggcgaaagccgagaaaccagctctgagcctggagaaagaaagcagcacgaccaacaccacagaacaggtgatcctgtcgaagatcgaagaaagcctgaagaacgcccagaaaccggtcgtgatcgctgggcacgaggtgattagcttcggtctggagaagacggttacgcagtttgtgagtgaaaccaaactgccgattactaccctgaactttggcaaatcggctgtggatgaatccctgccgtccttcctgggtatctacaatggtaaactgagcgagattagcctcaagaactttgtggaaagcgcagacttcatcctgatgcttggtgtgaaactgacggatagcagtacgggcgcgtttacgcaccatctggacgagaacaagatgattagcctgaacattgatgaaggcatcatcttcaacaaagtcgtagaagacttcgatttccgtgcggttgttagcagcctgagcgagctgaaaggcattgaatacgaaggtcagtacattgataagcagtacgaagagttcattccgagcagccgtccactgagccaagaccgtctgtggcaagcagtagaatctctgacacagtccaatgaaaccattgtggcggaacagggcacgtcgttcttcggtgcctccaccatcttcctgaagagcaattcacgcttcatcggtcagccgctttggggcagcatcggctatacgtttccggcagcactgggatcacagattgcggataaggaaagtcgccatctgctgttcattggtgatggtagcctgcaactgaccgtgcaggagctgggcctgtcgatccgtgagaaactgaacccgatttgtttcatcatcaacaacgatggctataccgtagagcgcgagattcatgggcctacacagagctacaatgacatcccgatgtggaactatagcaaactgccggaaacctttggcgcgacggaagatcgcgtagttagcaagatcgttcgcacagagaacgagtttgtgagtgtcatgaaagaagcgcaggccgatgttaaccgcatgtattggattgaactggttctggagaaagaagatgcaccgaaactgctgaagaagatggggaagctgtttgcagaacagaacaaa

SEQ ID NO: 438 - protein, 547 aa, Artificial Sequence
  Variant of branched-chain keto acid decarboxylase (kdcA) from Lactococcus lactis
MYTVGDYLLDRLHELGIEEIFGVPGDYNLQFLDQIISREDMKWIGNANELNASYMADGYARTKKAAAFLTTFGVGELSAINGLAGSYAENLPVVEIVGSPTSKVQNDGKFVHHTLADGDFKHFMKMHEPVTAARTLLTAENATYEIDRVLSQLLKERKPVYINLPVDVAAAKAEKPALSLEKESSTTNTTEQVILSKIEESLKNAQKPVVIAGHEVISFGLEKTVTQFVSETKLPITTLNFGKSAVDESLPSFLGIYNGKLSEISLKNFVESADFILMLGVKLTDSSTGAFTHHLDENKMISLNIDEGIIFNKVVEDFDFRAVVSSLSELKGIEYEGQYIDKQYEEFIPSSRPLSQDRLWQAVESLTQSNETIVAEQGTSFFGASTIFLKSNSRFIGQPLWGSIGYTFPAALGSQIADKESRHLLFIGDGSLQLTVQELGLSIREKLNPICFIINNDGYTVEREIHGPTQSYNDIPMWNYSKLPETFGATEDRVVSKIVRTENEFVSVMKEAQADVNRMYWIELVLEKEDAPKLLKKMGKLFAEQNK

SEQ ID NO: 439 - DNA, 1641 bp, Artificial Sequence
  Variant of branched-chain keto acid decarboxylase (kdcA) from Lactococcus lactis
atgtacaccgttggcgactatctgctggaccgtctgcatgaactgggaattgaagaaatctttggcgtgccgggcgattacaatctgcaattcctggatcaaatcattagccgcgaagatatgaaatggattggtaacgcgaatgaactgaatgcgagctacatggctgatggctatgcacgtacgaagaaggcggcggcgttcctgacgaccttcggtgttggtgaactgagcgcaatcaatgggttggcgggcagctatgcagagaacctgccagtcgtggaaatcgttgggagtccgacctcgaaggtgcagaacgatggcaagttcgttcatcacaccctggccgacggcgacttcaagcacttcatgaagatgcacgaaccggtcaccgctgcacgtacactgctgaccgccgagaacgcgacctatgagattgaccgcgtgctgagccaactgctgaaagaacgtaaacctgtgtacatcaacctgccggttgatgtcgccgcggcgaaagccgagaaaccagctctgagcctggagaaagaaagcagcacgaccaacaccacagaacaggtgatcctgtcgaagatcgaagaaagcctgaagaacgcccagaaaccggtcgtgatcgctgggcacgaggtgattagcttcggtctggagaagacggttacgcagtttgtgagtgaaaccaaactgccgattactaccctgaactttggcaaatcggctgtggatgaatccctgccgtccttcctgggtatctacaatggtaaactgagcgagattagcctcaagaactttgtggaaagcgcagacttcatcctgatgcttggtgtgaaactgacggatagcagtacgggcgcgtttacgcaccatctggacgagaacaagatgattagcctgaacattgatgaaggcatcatcttcaacaaagtcgtagaagacttcgatttccgtgcggttgttagcagcctgagcgagctgaaaggcattgaatacgaaggtcagtacattgataagcagtacgaagagttcattccgagcagcgcaccactgtttcaagaccgtctgtggcaagcagtagaatctctgacacagtccaatgaaaccattgtggcggaacagggcacgtcgttcttcggtgcctccaccatcttcctgaagagcaattcacgcttcatcggtcagccgctttggggcagcatcggctatacgtttccggcagcactgggatcacagattgcggataaggaaagtcgccatctgctgttcattggtgatggtagcctgcaactgaccgtgcaggagctgggcctgtcgatccgtgagaaactgaacccgatttgtttcatcatcaacaacgatggctataccgtagagcgcgagattcatgggcctacacagagctacaatgacatcccgatgtggaactatagcaaactgccggaaacctttggcgcgacggaagatcgcgtagttagcaagatcgttcgcacagagaacgagtttgtgagtgtcatgaaagaagcgcaggccgatgttaaccgcatgtattggattgaactggttctggagaaagaagatgcaccgaaactgctgaagaagatggggaagctgtttgcagaacagaacaaa

SEQ ID NO: 440 - protein, 547 aa, Artificial Sequence
  Variant of branched-chain keto acid decarboxylase (kdcA) from Lactococcus lactis
MYTVGDYLLDRLHELGIEEIFGVPGDYNLQFLDQIISREDMKWIGNANELNASYMADGYARTKKAAAFLTTFGVGELSAINGLAGSYAENLPVVEIVGSPTSKVQNDGKFVHHTLADGDFKHFMKMHEPVTAARTLLTAENATYEIDRVLSQLLKERKPVYINLPVDVAAAKAEKPALSLEKESSTTNTTEQVILSKIEESLKNAQKPVVIAGHEVISFGLEKTVTQFVSETKLPITTLNFGKSAVDESLPSFLGIYNGKLSEISLKNFVESADFILMLGVKLTDSSTGAFTHHLDENKMISLNIDEGIIFNKVVEDFDFRAVVSSLSELKGIEYEGQYIDKQYEEFIPSSAPLFQDRLWQAVESLTQSNETIVAEQGTSFFGASTIFLKSNSRFIGQPLWGSIGYTFPAALGSQIADKESRHLLFIGDGSLQLTVQELGLSIREKLNPICFIINNDGYTVEREIHGPTQSYNDIPMWNYSKLPETFGATEDRVVSKIVRTENEFVSVMKEAQADVNRMYWIELVLEKEDAPKLLKKMGKLFAEQNK

SEQ ID NO: 441 - DNA, 1641 bp, Artificial Sequence
  Variant of branched-chain keto acid decarboxylase (kdcA) from Lactococcus lactis
atgtacaccgttggcgactatctgctggaccgtctgcatgaactgggaattgaagaaatctttggcgtgccgggcgattacaatctgcaattcctggatcaaatcattagccgcgaagatatgaaatggattggtaacgcgaatgaactgaatgcgagctacatggctgatggctatgcacgtacgaagaaggcggcggcgttcctgacgaccttcggtgttggtgaactgagcgcaatcaatgggttggcgggcagctatgcagagaacctgccagtcgtggaaatcgttgggagtccgacctcgaaggtgcagaacgatggcaagttcgttcatcacaccctggccgacggcgacttcaagcacttcatgaagatgcacgaaccggtcaccgctgcacgtacactgctgaccgccgagaacgcgacctatgagattgaccgcgtgctgagccaactgctgaaagaacgtaaacctgtgtacatcaacctgccggttgatgtcgccgcggcgaaagccgagaaaccagctctgagcctggagaaagaaagcagcacgaccaacaccacagaacaggtgatcctgtcgaagatcgaagaaagcctgaagaacgcccagaaaccggtcgtgatcgctgggcacgaggtgattagcttcggtctggagaagacggttacgcagtttgtgagtgaaaccaaactgccgattactaccctgaactttggcaaatcggctgtggatgaatccctgccgtccttcctgggtatctacaatggtaaactgagcgagattagcctcaagaactttgtggaaagcgcagacttcatcctgatgcttggtgtgaaactgacggatagcagtacgggcgcgtttacgcaccatctggacgagaacaagatgattagcctgaacattgatgaaggcatcatcttcaacaaagtcgtagaagacttcgatttccgtgcggttgttagcagcctgagcgagctgaaaggcattgaatacgaaggtcagtacattgataagcagtacgaagagcttattccgagcagcgcaccactgagccaagaccgtctgtggcaagcagtagaatctctgacacagtccaatgaaaccattgtggcggaacagggcacgtcgttcttcggtgcctccaccatcttcctgaagagcaattcacgcttcatcggtcagccgctttggggcagcatcggctatacgtttccggcagcactgggatcacagattgcggataaggaaagtcgccatctgctgttcattggtgatggtagcctgcaactgaccgtgcaggagctgggcctgtcgatccgtgagaaactgaacccgatttgtttcatcatcaacaacgatggctataccgtagagcgcgagattcatgggcctacacagagctacaatgacatcccgatgtggaactatagcaaactgccggaaacctttggcgcgacggaagatcgcgtagttagcaagatcgttcgcacagagaacgagtttgtgagtgtcatgaaagaagcgcaggccgatgttaaccgcatgtattggattgaactggttctggagaaagaagatgcaccgaaactgctgaagaagatggggaagctgtttgcagaacagaacaaa

SEQ ID NO: 442 - protein, 547 aa, Artificial Sequence
  Variant of branched-chain keto acid decarboxylase (kdcA) from Lactococcus lactis
MYTVGDYLLDRLHELGIEEIFGVPGDYNLQFLDQIISREDMKWIGNANELNASYMADGYARTKKAAAFLTTFGVGELSAINGLAGSYAENLPVVEIVGSPTSKVQNDGKFVHHTLADGDFKHFMKMHEPVTAARTLLTAENATYEIDRVLSQLLKERKPVYINLPVDVAAAKAEKPALSLEKESSTTNTTEQVILSKIEESLKNAQKPVVIAGHEVISFGLEKTVTQFVSETKLPITTLNFGKSAVDESLPSFLGIYNGKLSEISLKNFVESADFILMLGVKLTDSSTGAFTHHLDENKMISLNIDEGIIFNKVVEDFDFRAVVSSLSELKGIEYEGQYIDKQYEELIPSSAPLSQDRLWQAVESLTQSNETIVAEQGTSFFGASTIFLKSNSRFIGQPLWGSIGYTFPAALGSQIADKESRHLLFIGDGSLQLTVQELGLSIREKLNPICFIINNDGYTVEREIHGPTQSYNDIPMWNYSKLPETFGATEDRVVSKIVRTENEFVSVMKEAQADVNRMYWIELVLEKEDAPKLLKKMGKLFAEQNK

SEQ ID NO: 443 - DNA, 1641 bp, Artificial Sequence
  Variant of branched-chain keto acid decarboxylase (kdcA) from Lactococcus lactis
atgtacaccgttggcgactatctgctggaccgtctgcatgaactgggaattgaagaaatctttggcgtgccgggcgattacaatctgcaattcctggatcaaatcattagccgcgaagatatgaaatggattggtaacgcgaatgaactgaatgcgagctacatggctgatggctatgcacgtacgaagaaggcggcggcgttcctgacgaccttcggtgttggtgaactgagcgcaatcaatgggttggcgggcagctatgcagagaacctgccagtcgtggaaatcgttgggagtccgacctcgaaggtgcagaacgatggcaagttcgttcatcacaccctggccgacggcgacttcaagcacttcatgaagatgcacgaaccggtcaccgctgcacgtacactgctgaccgccgagaacgcgacctatgagattgaccgcgtgctgagccaactgctgaaagaacgtaaacctgtgtacatcaacctgccggttgatgtcgccgcggcgaaagccgagaaaccagctctgagcctggagaaagaaagcagcacgaccaacaccacagaacaggtgatcctgtcgaagatcgaagaaagcctgaagaacgcccagaaaccggtcgtgatcgctgggcacgaggtgattagcttcggtctggagaagacggttacgcagtttgtgagtgaaaccaaactgccgattactaccctgaactttggcaaatcggctgtggatgaatccctgccgtccttcctgggtatctacaatggtaaactgagcgagattagcctcaagaactttgtggaaagcgcagacttcatcctgatgcttggtgtgaaactgacggatagcagtacgggcgcgtttacgcaccatctggacgagaacaagatgattagcctgaacattgatgaaggcatcatcttcaacaaagtcgtagaagacttcgatttccgtgcggttgttagcagcctgagcgagctgaaaggcattgaatacgaaggtcagtacattgataagcagtacgaagagttcattccgagcagcgcaccactggttcaagaccgtctgtggcaagcagtagaatctctgacacagtccaatgaaaccattgtggcggaacagggcacgtcgttcttcggtgcctccaccatcttcctgaagagcaattcacgcttcatcggtcagccgctttggggcagcatcggctatacgtttccggcagcactgggatcacagattgcggataaggaaagtcgccatctgctgttcattggtgatggtagcctgcaactgaccgtgcaggagctgggcctgtcgatccgtgagaaactgaacccgatttgtttcatcatcaacaacgatggctataccgtagagcgcgagattcatgggcctacacagagctacaatgacatcccgatgtggaactatagcaaactgccggaaacctttggcgcgacggaagatcgcgtagttagcaagatcgttcgcacagagaacgagtttgtgagtgtcatgaaagaagcgcaggccgatgttaaccgcatgtattggattgaactggttctggagaaagaagatgcaccgaaactgctgaagaagatggggaagctgtttgcagaacagaacaaa

SEQ ID NO: 444 - protein, 547 aa, Artificial Sequence
  Variant of branched-chain keto acid decarboxylase (kdcA) from Lactococcus lactis
MYTVGDYLLDRLHELGIEEIFGVPGDYNLQFLDQIISREDMKWIGNANELNASYMADGYARTKKAAAFLTTFGVGELSAINGLAGSYAENLPVVEIVGSPTSKVQNDGKFVHHTLADGDFKHFMKMHEPVTAARTLLTAENATYEIDRVLSQLLKERKPVYINLPVDVAAAKAEKPALSLEKESSTTNTTEQVILSKIEESLKNAQKPVVIAGHEVISFGLEKTVTQFVSETKLPITTLNFGKSAVDESLPSFLGIYNGKLSEISLKNFVESADFILMLGVKLTDSSTGAFTHHLDENKMISLNIDEGIIFNKVVEDFDFRAVVSSLSELKGIEYEGQYIDKQYEEFIPSSAPLVQDRLWQAVESLTQSNETIVAEQGTSFFGASTIFLKSNSRFIGQPLWGSIGYTFPAALGSQIADKESRHLLFIGDGSLQLTVQELGLSIREKLNPICFIINNDGYTVEREIHGPTQSYNDIPMWNYSKLPETFGATEDRVVSKIVRTENEFVSVMKEAQADVNRMYWIELVLEKEDAPKLLKKMGKLFAEQNK

SEQ ID NO: 445 - DNA, 1641 bp, Artificial Sequence
  Variant of branched-chain keto acid decarboxylase (kdcA) from Lactococcus lactis
atgtacaccgttggcgactatctgctggaccgtctgcatgaactgggaattgaagaaatctttggcgtgccgggcgattacaatctgcaattcctggatcaaatcattagccgcgaagatatgaaatggattggtaacgcgaatgaactgaatgcgagctacatggctgatggctatgcacgtacgaagaaggcggcggcgttcctgacgaccttcggtgttggtgaactgagcgcaatcaatgggttggcgggcagctatgcagagaacctgccagtcgtggaaatcgttgggagtccgacctcgaaggtgcagaacgatggcaagttcgttcatcacaccctggccgacggcgacttcaagcacttcatgaagatgcacgaaccggtcaccgctgcacgtacactgctgaccgccgagaacgcgacctatgagattgaccgcgtgctgagccaactgctgaaagaacgtaaacctgtgtacatcaacctgccggttgatgtcgccgcggcgaaagccgagaaaccagctctgagcctggagaaagaaagcagcacgaccaacaccacagaacaggtgatcctgtcgaagatcgaagaaagcctgaagaacgcccagaaaccggtcgtgatcgctgggcacgaggtgattagcttcggtctggagaagacggttacgcagtttgtgagtgaaaccaaactgccgattactaccctgaactttggcaaatcggctgtggatgaatccctgccgtccttcctgggtatctacaatggtaaactgagcgagattagcctcaagaactttgtggaaagcgcagacttcatcctgatgcttggtgtgaaactgacggatagcagtacgggcgcgtttacgcaccatctggacgagaacaagatgattagcctgaacattgatgaaggcatcatcttcaacaaagtcgtagaagacttcgatttccgtgcggttgttagcagcctgagcgagctgaaaggcattgaatacgaaggtcagtacattgataagcagtacgaagagttcattccgagcagcgcaccactgagccaagaccgtctgtggcaagcagtagaatctctgacacagtccaatgaaaccattgtggcggaacagggcacgtcgttcttcggtgcctccaccatctggctgaagagcaattcacgcttcatcggtcagccgctttggggcagcatcggctatacgtttccggcagcactgggatcacagattgcggataaggaaagtcgccatctgctgttcattggtgatggtagcctgcaactgaccgtgcaggagctgggcctgtcgatccgtgagaaactgaacccgatttgtttcatcatcaacaacgatggctataccgtagagcgcgagattcatgggcctacacagagctacaatgacatcccgatgtggaactatagcaaactgccggaaacctttggcgcgacggaagatcgcgtagttagcaagatcgttcgcacagagaacgagtttgtgagtgtcatgaaagaagcgcaggccgatgttaaccgcatgtattggattgaactggttctggagaaagaagatgcaccgaaactgctgaagaagatggggaagctgtttgcagaacagaacaaa

SEQ ID NO: 446 - protein, 547 aa, Artificial Sequence
  Variant of branched-chain keto acid decarboxylase (kdcA) from Lactococcus lactis
MYTVGDYLLDRLHELGIEEIFGVPGDYNLQFLDQIISREDMKWIGNANELNASYMADGYARTKKAAAFLTTFGVGELSAINGLAGSYAENLPVVEIVGSPTSKVQNDGKFVHHTLADGDFKHFMKMHEPVTAARTLLTAENATYEIDRVLSQLLKERKPVYINLPVDVAAAKAEKPALSLEKESSTTNTTEQVILSKIEESLKNAQKPVVIAGHEVISFGLEKTVTQFVSETKLPITTLNFGKSAVDESLPSFLGIYNGKLSEISLKNFVESADFILMLGVKLTDSSTGAFTHHLDENKMISLNIDEGIIFNKVVEDFDFRAVVSSLSELKGIEYEGQYIDKQYEEFIPSSAPLSQDRLWQAVESLTQSNETIVAEQGTSFFGASTIWLKSNSRFIGQPLWGSIGYTFPAALGSQIADKESRHLLFIGDGSLQLTVQELGLSIREKLNPICFIINNDGYTVEREIHGPTQSYNDIPMWNYSKLPETFGATEDRVVSKIVRTENEFVSVMKEAQADVNRMYWIELVLEKEDAPKLLKKMGKLFAEQNK

SEQ ID NO: 447 - DNA, 1641 bp, Artificial Sequence
  Variant of branched-chain keto acid decarboxylase (kdcA) from Lactococcus lactis
atgtacaccgttggcgactatctgctggaccgtctgcatgaactgggaattgaagaaatctttggcgtgccgggcgattacaatctgcaattcctggatcaaatcattagccgcgaagatatgaaatggattggtaacgcgaatgaactgaatgcgagctacatggctgatggctatgcacgtacgaagaaggcggcggcgttcctgacgaccttcggtgttggtgaactgagcgcaatcaatgggttggcgggcagctatgcagagaacctgccagtcgtggaaatcgttgggagtccgacctcgaaggtgcagaacgatggcaagttcgttcatcacaccctggccgacggcgacttcaagcacttcatgaagatgcacgaaccggtcaccgctgcacgtacactgctgaccgccgagaacgcgacctatgagattgaccgcgtgctgagccaactgctgaaagaacgtaaacctgtgtacatcaacctgccggttgatgtcgccgcggcgaaagccgagaaaccagctctgagcctggagaaagaaagcagcacgaccaacaccacagaacaggtgatcctgtcgaagatcgaagaaagcctgaagaacgcccagaaaccggtcgtgatcgctgggcacgaggtgattagcttcggtctggagaagacggttacgcagtttgtgagtgaaaccaaactgccgattactaccctgaactttggcaaatcggctgtggatgaatccctgccgtccttcctgggtatctacaatggtaaactgagcgagattagcctcaagaactttgtggaaagcgcagacttcatcctgatgcttggtgtgaaactgacggatagcagtacgggcgcgtttacgcaccatctggacgagaacaagatgattagcctgaacattgatgaaggcatcatcttcaacaaagtcgtagaagacttcgatttccgtgcggttgttagcagcctgagcgagctgaaaggcattgaatacgaaggtcagtacattgataagcagtacgaagagttcattccgagcagcgcaccactgagccaagaccgtctgtggcaagcagtagaatctctgacacagtccaatgaaaccattgtggcggaacagggcacgtcgttcttcggtgcctccaccatcgatctgaagagcaattcacgcttcatcggtcagccgctttggggcagcatcggctatacgtttccggcagcactgggatcacagattgcggataaggaaagtcgccatctgctgttcattggtgatggtagcctgcaactgaccgtgcaggagctgggcctgtcgatccgtgagaaactgaacccgatttgtttcatcatcaacaacgatggctataccgtagagcgcgagattcatgggcctacacagagctacaatgacatcccgatgtggaactatagcaaactgccggaaacctttggcgcgacggaagatcgcgtagttagcaagatcgttcgcacagagaacgagtttgtgagtgtcatgaaagaagcgcaggccgatgttaaccgcatgtattggattgaactggttctggagaaagaagatgcaccgaaactgctgaagaagatggggaagctgtttgcagaacagaacaaa

SEQ ID NO: 448 - protein, 547 aa, Artificial Sequence
  Variant of branched-chain keto acid decarboxylase (kdcA) from Lactococcus lactis
MYTVGDYLLDRLHELGIEEIFGVPGDYNLQFLDQIISREDMKWIGNANELNASYMADGYARTKKAAAFLTTFGVGELSAINGLAGSYAENLPVVEIVGSPTSKVQNDGKFVHHTLADGDFKHFMKMHEPVTAARTLLTAENATYEIDRVLSQLLKERKPVYINLPVDVAAAKAEKPALSLEKESSTTNTTEQVILSKIEESLKNAQKPVVIAGHEVISFGLEKTVTQFVSETKLPITTLNFGKSAVDESLPSFLGIYNGKLSEISLKNFVESADFILMLGVKLTDSSTGAFTHHLDENKMISLNIDEGIIFNKVVEDFDFRAVVSSLSELKGIEYEGQYIDKQYEEFIPSSAPLSQDRLWQAVESLTQSNETIVAEQGTSFFGASTIDLKSNSRFIGQPLWGSIGYTFPAALGSQIADKESRHLLFIGDGSLQLTVQELGLSIREKLNPICFIINNDGYTVEREIHGPTQSYNDIPMWNYSKLPETFGATEDRVVSKIVRTENEFVSVMKEAQADVNRMYWIELVLEKEDAPKLLKKMGKLFAEQNK

SEQ ID NO: 449 - DNA, 1641 bp, Artificial Sequence
  Variant of branched-chain keto acid decarboxylase (kdcA) from Lactococcus lactis
atgtacaccgttggcgactatctgctggaccgtctgcatgaactgggaattgaagaaatctttggcgtgccgggcgattacaatctgcaattcctggatcaaatcattagccgcgaagatatgaaatggattggtaacgcgaatgaactgaatgcgagctacatggctgatggctatgcacgtacgaagaaggcggcggcgttcctgacgaccttcggtgttggtgaactgagcgcaatcaatgggttggcgggcagctatgcagagaacctgccagtcgtggaaatcgttgggagtccgacctcgaaggtgcagaacgatggcaagttcgttcatcacaccctggccgacggcgacttcaagcacttcatgaagatgcacgaaccggtcaccgctgcacgtacactgctgaccgccgagaacgcgacctatgagattgaccgcgtgctgagccaactgctgaaagaacgtaaacctgtgtacatcaacctgccggttgatgtcgccgcggcgaaagccgagaaaccagctctgagcctggagaaagaaagcagcacgaccaacaccacagaacaggtgatcctgtcgaagatcgaagaaagcctgaagaacgcccagaaaccggtcgtgatcgctgggcacgaggtgattagcttcggtctggagaagacggttacgcagtttgtgagtgaaaccaaactgccgattactaccctgaactttggcaaatcggctgtggatgaatccctgccgtccttcctgggtatctacaatggtaaactgagcgagattagcctcaagaactttgtggaaagcgcagacttcatcctgatgcttggtgtgaaactgacggatagcagtacgggcgcgtttacgcaccatctggacgagaacaagatgattagcctgaacattgatgaaggcatcatcttcaacaaagtcgtagaagacttcgatttccgtgcggttgttagcagcctgagcgagctgaaaggcattgaatacgaaggtcagtacattgataagcagtacgaagagttcattccgagcagcgcaccactgagccaagaccgtctgtggcaagcagtagaatctctgacacagtccaatgaaaccattgtggcggaacagggcacgtcgttcttcggtgcctccaccatcaatctgaagagcaattcacgcttcatcggtcagccgctttggggcagcatcggctatacgtttccggcagcactgggatcacagattgcggataaggaaagtcgccatctgctgttcattggtgatggtagcctgcaactgaccgtgcaggagctgggcctgtcgatccgtgagaaactgaacccgatttgtttcatcatcaacaacgatggctataccgtagagcgcgagattcatgggcctacacagagctacaatgacatcccgatgtggaactatagcaaactgccggaaacctttggcgcgacggaagatcgcgtagttagcaagatcgttcgcacagagaacgagtttgtgagtgtcatgaaagaagcgcaggccgatgttaaccgcatgtattggattgaactggttctggagaaagaagatgcaccgaaactgctgaagaagatggggaagctgtttgcagaacagaacaaa

SEQ ID NO: 450 - protein, 547 aa, Artificial Sequence
  Variant of branched-chain keto acid decarboxylase (kdcA) from Lactococcus lactis
MYTVGDYLLDRLHELGIEEIFGVPGDYNLQFLDQIISREDMKWIGNANELNASYMADGYARTKKAAAFLTTFGVGELSAINGLAGSYAENLPVVEIVGSPTSKVQNDGKFVHHTLADGDFKHFMKMHEPVTAARTLLTAENATYEIDRVLSQLLKERKPVYINLPVDVAAAKAEKPALSLEKESSTTNTTEQVILSKIEESLKNAQKPVVIAGHEVISFGLEKTVTQFVSETKLPITTLNFGKSAVDESLPSFLGIYNGKLSEISLKNFVESADFILMLGVKLTDSSTGAFTHHLDENKMISLNIDEGIIFNKVVEDFDFRAVVSSLSELKGIEYEGQYIDKQYEEFIPSSAPLSQDRLWQAVESLTQSNETIVAEQGTSFFGASTINLKSNSRFIGQPLWGSIGYTFPAALGSQIADKESRHLLFIGDGSLQLTVQELGLSIREKLNPICFIINNDGYTVEREIHGPTQSYNDIPMWNYSKLPETFGATEDRVVSKIVRTENEFVSVMKEAQADVNRMYWIELVLEKEDAPKLLKKMGKLFAEQNK

SEQ ID NO: 451 - DNA, 1641 bp, Artificial Sequence
  Variant of branched-chain keto acid decarboxylase (kdcA) from Lactococcus lactis
atgtacaccgttggcgactatctgctggaccgtctgcatgaactgggaattgaagaaatctttggcgtgccgggcgattacaatctgcaattcctggatcaaatcattagccgcgaagatatgaaatggattggtaacgcgaatgaactgaatgcgagctacatggctgatggctatgcacgtacgaagaaggcggcggcgttcctgacgaccttcggtgttggtgaactgagcgcaatcaatgggttggcgggcagctatgcagagaacctgccagtcgtggaaatcgttgggagtccgacctcgaaggtgcagaacgatggcaagttcgttcatcacaccctggccgacggcgacttcaagcacttcatgaagatgcacgaaccggtcaccgctgcacgtacactgctgaccgccgagaacgcgacctatgagattgaccgcgtgctgagccaactgctgaaagaacgtaaacctgtgtacatcaacctgccggttgatgtcgccgcggcgaaagccgagaaaccagctctgagcctggagaaagaaagcagcacgaccaacaccacagaacaggtgatcctgtcgaagatcgaagaaagcctgaagaacgcccagaaaccggtcgtgatcgctgggcacgaggtgattagcttcggtctggagaagacggttacgcagtttgtgagtgaaaccaaactgccgattactaccctgaactttggcaaatcggctgtggatgaatccctgccgtccttcctgggtatctacaatggtaaactgagcgagattagcctcaagaactttgtggaaagcgcagacttcatcctgatgcttggtgtgaaactgacggatagcagtacgggcgcgtttacgcaccatctggacgagaacaagatgattagcctgaacattgatgaaggcatcatcttcaacaaagtcgtagaagacttcgatttccgtgcggttgttagcagcctgagcgagctgaaaggcattgaatacgaaggtcagtacattgataagcagtacgaagagttcattccgagcagcgcaccactgagccaagaccgtctgtggcaagcagtagaatctctgacacagtccaatgaaaccattgtggcggaacagggcacgtcgttcttcggtgcctccaccatcttcctgaagagcaattcacgcttcatcggtcagccgctttggggcagcatcggctatacgtttccggcagcactgggatcacagattgcggataaggaaagtcgccatctgctgttcattggtgatggtagcctgcaactgaccgtgcaggagctgggcctgtcgatccgtgagcatctgaacccgatttgtttcatcatcaacaacgatggctataccgtagagcgcgagattcatgggcctacacagagctacaatgacatcccgatgtggaactatagcaaactgccggaaacctttggcgcgacggaagatcgcgtagttagcaagatcgttcgcacagagaacgagtttgtgagtgtcatgaaagaagcgcaggccgatgttaaccgcatgtattggattgaactggttctggagaaagaagatgcaccgaaactgctgaagaagatggggaagctgtttgcagaacagaacaaa

SEQ ID NO: 452 - protein, 547 aa, Artificial Sequence
  Variant of branched-chain keto acid decarboxylase (kdcA) from Lactococcus lactis
MYTVGDYLLDRLHELGIEEIFGVPGDYNLQFLDQIISREDMKWIGNANELNASYMADGYARTKKAAAFLTTFGVGELSAINGLAGSYAENLPVVEIVGSPTSKVQNDGKFVHHTLADGDFKHFMKMHEPVTAARTLLTAENATYEIDRVLSQLLKERKPVYINLPVDVAAAKAEKPALSLEKESSTTNTTEQVILSKIEESLKNAQKPVVIAGHEVISFGLEKTVTQFVSETKLPITTLNFGKSAVDESLPSFLGIYNGKLSEISLKNFVESADFILMLGVKLTDSSTGAFTHHLDENKMISLNIDEGIIFNKVVEDFDFRAVVSSLSELKGIEYEGQYIDKQYEEFIPSSAPLSQDRLWQAVESLTQSNETIVAEQGTSFFGASTIFLKSNSRFIGQPLWGSIGYTFPAALGSQIADKESRHLLFIGDGSLQLTVQELGLSIREHLNPICFIINNDGYTVEREIHGPTQSYNDIPMWNYSKLPETFGATEDRVVSKIVRTENEFVSVMKEAQADVNRMYWIELVLEKEDAPKLLKKMGKLFAEQNK

SEQ ID NO: 453 - DNA, 1641 bp, Artificial Sequence
  Variant of branched-chain keto acid decarboxylase (kdcA) from Lactococcus lactis
atgtacaccgttggcgactatctgctggaccgtctgcatgaactgggaattgaagaaatctttggcgtgccgggcgattacaatctgcaattcctggatcaaatcattagccgcgaagatatgaaatggattggtaacgcgaatgaactgaatgcgagctacatggctgatggctatgcacgtacgaagaaggcggcggcgttcctgacgaccttcggtgttggtgaactgagcgcaatcaatgggttggcgggcagctatgcagagaacctgccagtcgtggaaatcgttgggagtccgacctcgaaggtgcagaacgatggcaagttcgttcatcacaccctggccgacggcgacttcaagcacttcatgaagatgcacgaaccggtcaccgctgcacgtacactgctgaccgccgagaacgcgacctatgagattgaccgcgtgctgagccaactgctgaaagaacgtaaacctgtgtacatcaacctgccggttgatgtcgccgcggcgaaagccgagaaaccagctctgagcctggagaaagaaagcagcacgaccaacaccacagaacaggtgatcctgtcgaagatcgaagaaagcctgaagaacgcccagaaaccggtcgtgatcgctgggcacgaggtgattagcttcggtctggagaagacggttacgcagtttgtgagtgaaaccaaactgccgattactaccctgaactttggcaaatcggctgtggatgaatccctgccgtccttcctgggtatctacaatggtaaactgagcgagattagcctcaagaactttgtggaaagcgcagacttcatcctgatgcttggtgtgaaactgacggatagcagtacgggcgcgtttacgcaccatctggacgagaacaagatgattagcctgaacattgatgaaggcatcatcttcaacaaagtcgtagaagacttcgatttccgtgcggttgttagcagcctgagcgagctgaaaggcattgaatacgaaggtcagtacattgataagcagtacgaagagttcattccgagcagcgcaccactgagccaagaccgtctgtggcaagcagtagaatctctgacacagtccaatgaaaccattgtggcggaacagggcacgtcgttcttcggtgcctccaccatcttcctgaagagcaattcacgcttcatcggtcagccgctttggggcagcatcggctatacgtttccggcagcactgggatcacagattgcggataaggaaagtcgccatctgctgttcattggtgatggtagcctgcaactgaccgtgcaggagctgggcctgtcgtggcgtgagaaactgaacccgatttgtttcatcatcaacaacgatggctataccgtagagcgcgagattcatgggcctacacagagctacaatgacatcccgatgtggaactatagcaaactgccggaaacctttggcgcgacggaagatcgcgtagttagcaagatcgttcgcacagagaacgagtttgtgagtgtcatgaaagaagcgcaggccgatgttaaccgcatgtattggattgaactggttctggagaaagaagatgcaccgaaactgctgaagaagatggggaagctgtttgcagaacagaacaaa

SEQ ID NO: 454 - protein, 547 aa, Artificial Sequence
  Variant of branched-chain keto acid decarboxylase (kdcA) from Lactococcus lactis
MYTVGDYLLDRLHELGIEEIFGVPGDYNLQFLDQIISREDMKWIGNANELNASYMADGYARTKKAAAFLTTFGVGELSAINGLAGSYAENLPVVEIVGSPTSKVQNDGKFVHHTLADGDFKHFMKMHEPVTAARTLLTAENATYEIDRVLSQLLKERKPVYINLPVDVAAAKAEKPALSLEKESSTTNTTEQVILSKIEESLKNAQKPVVIAGHEVISFGLEKTVTQFVSETKLPITTLNFGKSAVDESLPSFLGIYNGKLSEISLKNFVESADFILMLGVKLTDSSTGAFTHHLDENKMISLNIDEGIIFNKVVEDFDFRAVVSSLSELKGIEYEGQYIDKQYEEFIPSSAPLSQDRLWQAVESLTQSNETIVAEQGTSFFGASTIFLKSNSRFIGQPLWGSIGYTFPAALGSQIADKESRHLLFIGDGSLQLTVQELGLSWREKLNPICFIINNDGYTVEREIHGPTQSYNDIPMWNYSKLPETFGATEDRVVSKIVRTENEFVSVMKEAQADVNRMYWIELVLEKEDAPKLLKKMGKLFAEQNK

SEQ ID NO: 455 - DNA, 1641 bp, Artificial Sequence
  Variant of branched-chain keto acid decarboxylase (kdcA) from Lactococcus lactis
atgtacaccgttggcgactatctgctggaccgtctgcatgaactgggaattgaagaaatctttggcgtgccgggcgattacaatctgcaattcctggatcaaatcattagccgcgaagatatgaaatggattggtaacgcgaatgaactgaatgcgagctacatggctgatggctatgcacgtacgaagaaggcggcggcgttcctgacgaccttcggtgttggtgaactgagcgcaatcaatgggttggcgggcagctatgcagagaacctgccagtcgtggaaatcgttgggagtccgacctcgaaggtgcagaacgatggcaagttcgttcatcacaccctggccgacggcgacttcaagcacttcatgaagatgcacgaaccggtcaccgctgcacgtacactgctgaccgccgagaacgcgacctatgagattgaccgcgtgctgagccaactgctgaaagaacgtaaacctgtgtacatcaacctgccggttgatgtcgccgcggcgaaagccgagaaaccagctctgagcctggagaaagaaagcagcacgaccaacaccacagaacaggtgatcctgtcgaagatcgaagaaagcctgaagaacgcccagaaaccggtcgtgatcgctgggcacgaggtgattagcttcggtctggagaagacggttacgcagtttgtgagtgaaaccaaactgccgattactaccctgaactttggcaaatcggctgtggatgaatccctgccgtccttcctgggtatctacaatggtaaactgagcgagattagcctcaagaactttgtggaaagcgcagacttcatcctgatgcttggtgtgaaactgacggatagcagtacgggcgcgtttacgcaccatctggacgagaacaagatgattagcctgaacattgatgaaggcatcatcttcaacaaagtcgtagaagacttcgatttccgtgcggttgttagcagcctgagcgagctgaaaggcattgaatacgaaggtcagtacattgataagcagtacgaagagttcattccgagcagcgcaccactgagccaagaccgtctgtggcaagcagtagaatctctgacacagtccaatgaaaccattgtggcggaacagggcacgtcgttcttcggtgcctccaccatcttcctgaagagcaattcacgcttcatcggtcagccgctttggggcagcatcggctatacgtttccggcagcactgggatcacagattgcggataaggaaagtcgccatctgctgttcattggtgatggtagcctgcaactgaccgtgcaggagctgggcctgtcgatccgtgagcttctgaacccgatttgtttcatcatcaacaacgatggctataccgtagagcgcgagattcatgggcctacacagagctacaatgacatcccgatgtggaactatagcaaactgccggaaacctttggcgcgacggaagatcgcgtagttagcaagatcgttcgcacagagaacgagtttgtgagtgtcatgaaagaagcgcaggccgatgttaaccgcatgtattggattgaactggttctggagaaagaagatgcaccgaaactgctgaagaagatggggaagctgtttgcagaacagaacaaa

SEQ ID NO: 456 - protein, 547 aa, Artificial Sequence
  Variant of branched-chain keto acid decarboxylase (kdcA) from Lactococcus lactis
MYTVGDYLLDRLHELGIEEIFGVPGDYNLQFLDQIISREDMKWIGNANELNASYMADGYARTKKAAAFLTTFGVGELSAINGLAGSYAENLPVVEIVGSPTSKVQNDGKFVHHTLADGDFKHFMKMHEPVTAARTLLTAENATYEIDRVLSQLLKERKPVYINLPVDVAAAKAEKPALSLEKESSTTNTTEQVILSKIEESLKNAQKPVVIAGHEVISFGLEKTVTQFVSETKLPITTLNFGKSAVDESLPSFLGIYNGKLSEISLKNFVESADFILMLGVKLTDSSTGAFTHHLDENKMISLNIDEGIIFNKVVEDFDFRAVVSSLSELKGIEYEGQYIDKQYEEFIPSSAPLSQDRLWQAVESLTQSNETIVAEQGTSFFGASTIFLKSNSRFIGQPLWGSIGYTFPAALGSQIADKESRHLLFIGDGSLQLTVQELGLSIRELLNPICFIINNDGYTVEREIHGPTQSYNDIPMWNYSKLPETFGATEDRVVSKIVRTENEFVSVMKEAQADVNRMYWIELVLEKEDAPKLLKKMGKLFAEQNK

SEQ ID NO: 457 - DNA, 1641 bp, Artificial Sequence
  Variant of branched-chain keto acid decarboxylase (kdcA) from Lactococcus lactis
atgtacaccgttggcgactatctgctggaccgtctgcatgaactgggaattgaagaaatctttggcgtgccgggcgattacaatctgcaattcctggatcaaatcattagccgcgaagatatgaaatggattggtaacgcgaatgaactgaatgcgagctacatggctgatggctatgcacgtacgaagaaggcggcggcgttcctgacgaccttcggtgttggtgaactgagcgcaatcaatgggttggcgggcagctatgcagagaacctgccagtcgtggaaatcgttgggagtccgacctcgaaggtgcagaacgatggcaagttcgttcatcacaccctggccgacggcgacttcaagcacttcatgaagatgcacgaaccggtcaccgctgcacgtacactgctgaccgccgagaacgcgacctatgagattgaccgcgtgctgagccaactgctgaaagaacgtaaacctgtgtacatcaacctgccggttgatgtcgccgcggcgaaagccgagaaaccagctctgagcctggagaaagaaagcagcacgaccaacaccacagaacaggtgatcctgtcgaagatcgaagaaagcctgaagaacgcccagaaaccggtcgtgatcgctgggcacgaggtgattagcttcggtctggagaagacggttacgcagtttgtgagtgaaaccaaactgccgattactaccctgaactttggcaaatcggctgtggatgaatccctgccgtccttcctgggtatctacaatggtaaactgagcgagattagcctcaagaactttgtggaaagcgcagacttcatcctgatgcttggtgtgaaactgacggatagcagtacgggcgcgtttacgcaccatctggacgagaacaagatgattagcctgaacattgatgaaggcatcatcttcaacaaagtcgtagaagacttcgatttccgtgcggttgttagcagcctgagcgagctgaaaggcattgaatacgaaggtcagtacattgataagcagtacgaagagttcattccgagcagcgcaccactgagccaagaccgtctgtggcaagcagtagaatctctgacacagtccaatgaaaccattgtggcggaacagggcacgtcgttcttcggtgcctccaccatcttcctgaagagcaattcacgcttcatcggtcagccgctttggggcagcatcggctatacgtttccggcagcactgggatcacagattgcggataaggaaagtcgccatctgctgttcattggtgatggtagcctgcaactgaccgtgcaggagctgggcctgtcggttcgtgagaaactgaacccgatttgtttcatcatcaacaacgatggctataccgtagagcgcgagattcatgggcctacacagagctacaatgacatcccgatgtggaactatagcaaactgccggaaacctttggcgcgacggaagatcgcgtagttagcaagatcgttcgcacagagaacgagtttgtgagtgtcatgaaagaagcgcaggccgatgttaaccgcatgtattggattgaactggttctggagaaagaagatgcaccgaaactgctgaagaagatggggaagctgtttgcagaacagaacaaa

SEQ ID NO: 458 - protein, 547 aa, Artificial Sequence
  Variant of branched-chain keto acid decarboxylase (kdcA) from Lactococcus lactis
MYTVGDYLLDRLHELGIEEIFGVPGDYNLQFLDQIISREDMKWIGNANELNASYMADGYARTKKAAAFLTTFGVGELSAINGLAGSYAENLPVVEIVGSPTSKVQNDGKFVHHTLADGDFKHFMKMHEPVTAARTLLTAENATYEIDRVLSQLLKERKPVYINLPVDVAAAKAEKPALSLEKESSTTNTTEQVILSKIEESLKNAQKPVVIAGHEVISFGLEKTVTQFVSETKLPITTLNFGKSAVDESLPSFLGIYNGKLSEISLKNFVESADFILMLGVKLTDSSTGAFTHHLDENKMISLNIDEGIIFNKVVEDFDFRAVVSSLSELKGIEYEGQYIDKQYEEFIPSSAPLSQDRLWQAVESLTQSNETIVAEQGTSFFGASTIFLKSNSRFIGQPLWGSIGYTFPAALGSQIADKESRHLLFIGDGSLQLTVQELGLSVREKLNPICFIINNDGYTVEREIHGPTQSYNDIPMWNYSKLPETFGATEDRVVSKIVRTENEFVSVMKEAQADVNRMYWIELVLEKEDAPKLLKKMGKLFAEQNK

SEQ ID NO: 459 - DNA, 1641 bp, Artificial Sequence
  Variant of branched-chain keto acid decarboxylase (kdcA) from Lactococcus lactis
atgtacaccgttggcgactatctgctggaccgtctgcatgaactgggaattgaagaaatctttggcgtgccgggcgattacaatctgcaattcctggatcaaatcattgcgcgcgaagatatgaaatggattggtaacgcgaatgaactgaatgcgagctacatggctgatggctatgcacgtacgaagaaggcggcggcgttcctgacgaccttcggtgttggtgaactgagcgcaatcaatgggttggcgggcagctatgcagagaacctgccagtcgtggaaatcgttgggagtccgacctcgaaggtgcagaacgatggcaagttcgttcatcacaccctggccgacggcgacttcaagcacttcatgaagatgcacgaaccggtcaccgctgcacgtacactgctgaccgccgagaacgcgaccacagagattgaccgcgtgctgagccaactgctgaaagaacgtaaacctgtgtacatcaacctgccggttgatgtcgccgcggcgaaagccgagaaaccagctctgagcctggagaaagaaagcagcacgttaaacaccacagaacaggtgatcctgtcgaagatcgaagaaagcctgaagaacgcccagaaaccggtcgtgatcgctgggcacgaggtgattagcttcggtctggagaagacggttacgcagtttgtgagtgaaaccaaactgccgattactaccctgaactttggcaaatcggctgtggatgaatccctgccgtccttcctgggtatctacaatggtaaactgagcgagattagcctcaagaactttgtggaaagcgcagacttcatcctgatgcttggtgtgaaactgacggatatcagtacgggcgcgtttacgcaccatctggacgagaacaagatgattagcctgaacattgatgaaggcatcatcttcaacaaagtcgtagaagacttcgatttccgtgcggttgttagcagcctgttagagctgaaaggcattgaatacgaaggtcaatacattgataagcagtacgaagagttcattccgagcagcgcaccactgagccaagaccgtctgtggcaagcagtagaatctctgacacagtccaatgaaaccattgtggcggaacagggcacgtcgttcttcggtgcctccaccatcttcctgaagagcaattcacgcttcatcggtcagccgctttggggcagcatcggctatacgtttccggcagcactgggatcacagattgcggataaggaaagtcgccatctgctgttcattggtgatggtagcctgcaactgaccgtgcaggagctgggcctggcgatccgtgagaaactgaacccgatttgtttcatcatcaacaacgatggctataccgtagagcgcgagattcatgggcctacacagagctacaatgacatcccgatgtggaactatagcaaactgccggaaacctttggcgcgacggaagatcgcgtagttagcaagatcgttcgcacagagaacgagtttgtgagtgtcatgaaagaagcgcaggccgatgttaaccgcatgtattggattgaactggttctggagaaagaagatgcaccgaaactgctgaagaagatggggaagctgtttgcagaacagaacaaa

SEQ ID NO: 460 - protein, 547 aa, Artificial Sequence
  Variant of branched-chain keto acid decarboxylase (kdcA) from Lactococcus lactis
MYTVGDYLLDRLHELGIEEIFGVPGDYNLQFLDQIIAREDMKWIGNANELNASYMADGYARTKKAAAFLTTFGVGELSAINGLAGSYAENLPVVEIVGSPTSKVQNDGKFVHHTLADGDFKHFMKMHEPVTAARTLLTAENATTEIDRVLSQLLKERKPVYINLPVDVAAAKAEKPALSLEKESSTLNTTEQVILSKIEESLKNAQKPVVIAGHEVISFGLEKTVTQFVSETKLPITTLNFGKSAVDESLPSFLGIYNGKLSEISLKNFVESADFILMLGVKLTDISTGAFTHHLDENKMISLNIDEGIIFNKVVEDFDFRAVVSSLLELKGIEYEGQYIDKQYEEFIPSSAPLSQDRLWQAVESLTQSNETIVAEQGTSFFGASTIFLKSNSRFIGQPLWGSIGYTFPAALGSQIADKESRHLLFIGDGSLQLTVQELGLAIREKLNPICFIINNDGYTVEREIHGPTQSYNDIPMWNYSKLPETFGATEDRVVSKIVRTENEFVSVMKEAQADVNRMYWIELVLEKEDAPKLLKKMGKLFAEQNK

SEQ ID NO: 461 - DNA, 1641 bp, Artificial Sequence
  Variant of branched-chain keto acid decarboxylase (kdcA) from Lactococcus lactis
atgtacaccgttggcgactatctgctggaccgtctgcatgaactgggaattgaagaaatctttggcgtgccgggcgattacaatctgcaattcctggatcaaatcattgcgcgcgaagatatgaaatggattggtaacgcgaatgaactgaatgcgagctacatggctgatggctatgcacgtacgaagaaggcggcggcgttcctgacgaccttcggtgttggtgaactgagcgcaatcaatgggttggcgggcagctatgcagagaacctgccagtcgtggaaatcgttgggagtccgacctcgaaggtgcagaacgatggcaagttcgttcatcacaccctggccgacggcgacttcaagcacttctggaagatgcacgaaccggtcaccgctgcacgtacactgctgaccgccgagaacgcgaccacagagattgaccgcgtgctgagccggctgctgaaagaacgtaaacctgtgtacatcaacctgccggttgatgtcgccgcggcgaaagccgagaaaccagctctgagcctggagaaagaaagcagcacgttaaacaccacagaacaggtgatcctgtcgaagatcgaagaaagcctgaagaacgcccagaaaccggtcgtgatcgctgggcacgaggtgattagcttcggtctggagaagacggttacgcagtttgcgagtgaaaccaaactgccgattactaccctgaactttggcaaatcggctgtggatgaatccctgccgtccttcctaggtatctacaatggtaaactgagcgagattagcctcaagaactttgtggaaagcgcagacttcatcctgatgcttggtgtgaaactgacggatatcagtacgggcgcgtttacgcaccatctggacgagaacaagatgattagcctgaacattgatgaaggcatcatcttcaacaaagtcgtagaagacttcgatttcagcgcggttgttagcagcctgagcgagctgaaaggcattgaatacgaaggtcaatacattgataagcagtacgaagagttcgacccgggcagcgcaccactgagccaagaccgtctgtggcaagcagtagaatctctgacacagtccaatgaaaccattgtggcggaacagggcacgtcgttcttcggtgcctccaccatccccctgaagagcaattcacgcttcatcggtcagccgctttggggcagcatcggctatacgtttccggcagcactgggatcacagattgcggataaggaaagtcgccatctgctgttcattggtgatggtagcctgcaactgaccgtgcaggagctgggcctggcgatccgtgagaaactgaacccgatttgtttcatcatcaacaacgatggctataccgtagagcgcgagattcatgggcctacacagagctacaatgacatcccgatgtggaactatagcagactgccggaaacctttggcgcgacggaagatcgcgtagttagcaagatcgttcgcacagagaacgagtttgtgagtgtcatgaaagaagcgcaggccgatgttaaccgcatgtattggattgaactggttctggagaaagaagatgcaccgaaactgctgaagaagatggggaagctgtttgcagaacagaacaaa

SEQ ID NO: 462 - protein, 547 aa, Artificial Sequence
  Variant of branched-chain keto acid decarboxylase (kdcA) from Lactococcus lactis
MYTVGDYLLDRLHELGIEEIFGVPGDYNLQFLDQIIAREDMKWIGNANELNASYMADGYARTKKAAAFLTTFGVGELSAINGLAGSYAENLPVVEIVGSPTSKVQNDGKFVHHTLADGDFKHFWKMHEPVTAARTLLTAENATTEIDRVLSRLLKERKPVYINLPVDVAAAKAEKPALSLEKESSTLNTTEQVILSKIEESLKNAQKPVVIAGHEVISFGLEKTVTQFASETKLPITTLNFGKSAVDESLPSFLGIYNGKLSEISLKNFVESADFILMLGVKLTDISTGAFTHHLDENKMISLNIDEGIIFNKVVEDFDFSAVVSSLSELKGIEYEGQYIDKQYEEFDPGSAPLSQDRLWQAVESLTQSNETIVAEQGTSFFGASTIPLKSNSRFIGQPLWGSIGYTFPAALGSQIADKESRHLLFIGDGSLQLTVQELGLAIREKLNPICFIINNDGYTVEREIHGPTQSYNDIPMWNYSRLPETFGATEDRVVSKIVRTENEFVSVMKEAQADVNRMYWIELVLEKEDAPKLLKKMGKLFAEQNK

SEQ ID NO: 463 - DNA, 1641 bp, Artificial Sequence
  Variant of branched-chain keto acid decarboxylase (kdcA) from Lactococcus lactis
atgtacaccgttggcgactatctgctggaccgtctgcatgaactgggaattgaagaaatctttggcgtgccgggcgattacaatctgcaattcctggatcaaatcattgcgcgcgaagatatgaaatggattggtaacgcgaatgaactgaatgcgagctacatggctgatggctatgcacgtacgaagaaggcggcggcgttcctgacgaccttcggtgttggtgaactgagcgcaatcaatgggttggcgggcagctatgcagagaacctgccagtcgtggaaatcgttgggagtccgacctcgaaggtgcagaacgatggcaagttcgttcatcacaccctggccgacggcgacttcaagcacttctggaagatgcacgaaccggtcaccgctgcacgtacactgctgaccgccgagaacgcgaccacagagattgaccgcgtgctgagccagctgctgaaagaacgtaaacctgtgtacatcaacctgccggttgatgtcgccgcggcgaaagccgagaaaccagctctgagcctggagaaagaaagcagcacgttaaacaccacagaacaggtgatcctgtcgaagatcgaagaaagcctgaagaacgcccagaaaccggtcgtgatcgctgggcacgaggtgattagcttcggtctggagaagacggttacgcagtttgtgagtgaaacccacctgccgattactaccctgaactttggcaaatcggctgtggatgaatccctgccgtccttcggcggtatctacaatggtaaactgagcgagattagcctcaagaactttgtggaaagcgcagacttcatcctgatgcttggtgtgaaactgacggatatcagtacgggcgcgtttacgcaccatctggacgagaacaagatgattagcctgaacattgatgaaggcatcatcttcaacaaagtcgtagaagacttcgatttccgcgcggttgttagcagcctgttagagctgaaaggcattgaatacgaaggtcaatacattgataagcagtacgaagagttcgacccgagcagcaacccactgagccaagaccgtctgtggcaagcagtagaatctctgacacagtccaatgaaaccattgtggcggaacagggcacgtcgttcttcggtgcctccaccatccccctgaagagcaattcacgcttcatcggtcagccgctttggggcagcatcggctatacgtttccggcagcactgggatcacagattgcggataaggaaagtcgccatctgctgttcattggtgatggtagcctgcaactgaccgtgcaggagctgggcctggcgatccgtgagaaactgaacccgatttgtttcatcatcaacaacgatggctataccgtagagcgcgagattcatgggcctacacagagctacaatgacatcccgatgtggaactatagcaaactgccggaaacctttggcgcgacggaagatcgcgtagttagcaagatcgttcgcacagagaacgagtttgtgagtgtcatgaaagaagcgcaggccgatgttaaccgcatgtattggattgaactggttctggagaaagaagatgcaccgaaactgctgaagaagatggggaagctgtttgcagaacagaacaaa

SEQ ID NO: 464 - protein, 547 aa, Artificial Sequence
  Variant of branched-chain keto acid decarboxylase (kdcA) from Lactococcus lactis
MYTVGDYLLDRLHELGIEEIFGVPGDYNLQFLDQIIAREDMKWIGNANELNASYMADGYARTKKAAAFLTTFGVGELSAINGLAGSYAENLPVVEIVGSPTSKVQNDGKFVHHTLADGDFKHFWKMHEPVTAARTLLTAENATTEIDRVLSQLLKERKPVYINLPVDVAAAKAEKPALSLEKESSTLNTTEQVILSKIEESLKNAQKPVVIAGHEVISFGLEKTVTQFVSETHLPITTLNFGKSAVDESLPSFGGIYNGKLSEISLKNFVESADFILMLGVKLTDISTGAFTHHLDENKMISLNIDEGIIFNKVVEDFDFRAVVSSLLELKGIEYEGQYIDKQYEEFDPSSNPLSQDRLWQAVESLTQSNETIVAEQGTSFFGASTIPLKSNSRFIGQPLWGSIGYTFPAALGSQIADKESRHLLFIGDGSLQLTVQELGLAIREKLNPICFIINNDGYTVEREIHGPTQSYNDIPMWNYSKLPETFGATEDRVVSKIVRTENEFVSVMKEAQADVNRMYWIELVLEKEDAPKLLKKMGKLFAEQNK

SEQ ID NO: 465 - DNA, 1641 bp, Artificial Sequence
  Variant of branched-chain keto acid decarboxylase (kdcA) from Lactococcus lactis
atgtacaccgttggcgactatctgctggaccgtctgcatgaactgggaattgaagaaatctttggcgtgccgggcgattacaatctgcaattcctggatcaaatcattgcgcgcgaagatatgaaatggattggtaacgcgaatgaactgaatgcgagctacatggctgatggctatgcacgtacgaagaaggcggcggcgttcctgacgaccttcggtgttggtgaactgagcgcaatcaatgggttggcgggcagctatgcagagaacctgccagtcgtggaaatcgttgggagtccgacctcgaaggtgcagaacgatggcaagttcgttcatcacaccctggccgacggcgacttcaagcacttctggaagatgcacgaaccggtcaccgctgcacgtacactgctgaccgccgagaacgcgaccacagagattgaccgcgtgctgagccagctgctgaaagaacgtaaacctgtgtacatcaacctgccggttgatgtcgccgcggcgaaagccgagaaaccagctctgagcctggagaaagaaagcagcacgttaaacaccacagaacaggtgatcctgtcgaagatcgaagaaagcctgaagaacgcccagaaaccggtcgtgatcgctgggcacgaggtgattagcttcggtctggagaagacggttacgcagtttgtgagtgaaaccaaactgccgattactaccctgaactttggcaaatcggctgtggatgaatccctgccgtccttcctgggtatctacaatggtaaactgagcgagattagcctcaagaactttgtggaaagcgcagacttcatcctgatgcttggtgtgaaactgacggatatcagtacgggcgcgtttacgcaccatctggacgagaacaagatgattagcctgaacattgatgaaggcatcatcttcaacaaagtcgtagaagacttcgatttcagcgcggttgttagcagcctgagcgagctgaaaggcattgaatacgaaggtcaatacattgataagcagtacgaagagttcgacccgagcagcgcaccactgagccaagaccgtctgtggcaagcagtagaatctctgacacagtccaatgaaaccattgtggcggaacagggcacgtcgttcttcggtgcctccaccatccccctgaagagcaattcacgcttcatcggtcagccgctttggggcagcatcggctatacgtttccggcagcactgggatcacagattgcggataaggaaagtcgccatctgctgttcattggtgatggtagcctgcaactgaccgtgcaggagctgggcctggcgatccgtgagaaactgaacccgatttgtttcatcatcaacaacgatggctataccgtagagcgcgagattcatgggcctacacagagctacaatgacatcccgatgtggaactatagcaaactgccggaaacctttggcgcgacggaagatcgcgtagttagcaagatcgttcgcacagagaacgagtttgtgagtgtcatgaaagaagcgcaggccgatgttaaccgcatgtattggattgaactggttctggagaaagaagatgcaccgaaactgctgaagaagatggggaagctgtttgcagaacagaacaaa

SEQ ID NO: 466 - protein, 547 aa, Artificial Sequence
  Variant of branched-chain keto acid decarboxylase (kdcA) from Lactococcus lactis
MYTVGDYLLDRLHELGIEEIFGVPGDYNLQFLDQIIAREDMKWIGNANELNASYMADGYARTKKAAAFLTTFGVGELSAINGLAGSYAENLPVVEIVGSPTSKVQNDGKFVHHTLADGDFKHFWKMHEPVTAARTLLTAENATTEIDRVLSQLLKERKPVYINLPVDVAAAKAEKPALSLEKESSTLNTTEQVILSKIEESLKNAQKPVVIAGHEVISFGLEKTVTQFVSETKLPITTLNFGKSAVDESLPSFLGIYNGKLSEISLKNFVESADFILMLGVKLTDISTGAFTHHLDENKMISLNIDEGIIFNKVVEDFDFSAVVSSLSELKGIEYEGQYIDKQYEEFDPSSAPLSQDRLWQAVESLTQSNETIVAEQGTSFFGASTIPLKSNSRFIGQPLWGSIGYTFPAALGSQIADKESRHLLFIGDGSLQLTVQELGLAIREKLNPICFIINNDGYTVEREIHGPTQSYNDIPMWNYSKLPETFGATEDRVVSKIVRTENEFVSVMKEAQADVNRMYWIELVLEKEDAPKLLKKMGKLFAEQNK

SEQ ID NO: 467 - DNA, 1641 bp, Artificial Sequence
  Variant of branched-chain keto acid decarboxylase (kdcA) from Lactococcus lactis
atgtacaccgttggcgactatctgctggaccgtctgcatgaactgggaattgaagaaatctttggcgtgccgggcgattacaatctgcaattcctggatcaaatcattgcgcgcgaagatatgaaatggattggtaacgcgaatgaactgaatgcgagctacatggctgatggctatgcacgtacgaagaaggcggcggcgttcctgacgaccttcggtgttggtgaactgagcgcaatcaatgggttggcgggcagctatgcagagaacctgccagtcgtggaaatcgttgggagtccgacctcgaaggtgcagaacgatggcaagttcgttcatcacaccctggccgacggcgacttcaagcacttctggaagatgcacgaaccggtcaccgctgcacgtacactgctgaccgccgagaacgcgaccacagagattgaccgcgtgctgagccaactgctgaaagaacgtaaacctgtgtacatcaacctgccggttgatgtcgccgcggcgaaagccgagaaaccagctctgagcctggagaaagaaagcagcacgttaaacaccacagaacaggtgatcctgtcgaagatcgaagaaagcctgaagaacgcccagaaaccggtcgtgatcgctgggcacgaggtgattagcttcggtctggagaagacggttacgcagtttgtgagtgaaaccaaactgccgattactaccctgaactttggcaaatcggctgtggatgaatccctgccgtccttcggcggtatctacaatggtaaactgagcgagattagcctcaagaactttgtggaaagcgcagacttcatcctgatgcttggtgtgaaactgacggatatcagtacgggcgcgtttacgcaccatctggacgagaacaagatgattagcctgaacattgatgaaggcatcatcttcaacaaagtcgtagaagacttcgatttccgtgcggttgttagcagcctgaatgagctgaaaggcattgaatacgaaggtcaatacattgataagcagtacgaagagttcgacccgggcagcgcaccactgagccaagaccgtctgtggcaagcagtagaatctctgacacagtccaatgaaaccattgtggcggaacagggcacgtcgttcttcggtgcctccaccatcttcctgaagagcaattcacgcttcatcggtcagccgctttggggcagcatcggctatacgtttccggcagcactgggatcacagattgcggataaggaaagtcgccatctgctgttcattggtgatggtagcctgcaactgaccgtgcaggagctgggcctggcgatccgtgagaaactgaacccgatttgtttcatcatcaacaacgatggctataccgtagagcgcgagattcatgggcctacacagagctacaatgacatcccgatgtggaactatagcaaactgccggaaacctttggcgcgacggaagatcgcgtagttagcaagatcgttcgcacagagaacgagtttgtgagtgtcatgaaagaagcgcaggccgatgttaaccgcatgtattggattgaactggttctggagaaagaagatgcaccgaaactgctgaagaagatggggaagctgtttgcagaacagaacaaa

SEQ ID NO: 468 - protein, 547 aa, Artificial Sequence
  Variant of branched-chain keto acid decarboxylase (kdcA) from Lactococcus lactis
MYTVGDYLLDRLHELGIEEIFGVPGDYNLQFLDQIIAREDMKWIGNANELNASYMADGYARTKKAAAFLTTFGVGELSAINGLAGSYAENLPVVEIVGSPTSKVQNDGKFVHHTLADGDFKHFWKMHEPVTAARTLLTAENATTEIDRVLSQLLKERKPVYINLPVDVAAAKAEKPALSLEKESSTLNTTEQVILSKIEESLKNAQKPVVIAGHEVISFGLEKTVTQFVSETKLPITTLNFGKSAVDESLPSFGGIYNGKLSEISLKNFVESADFILMLGVKLTDISTGAFTHHLDENKMISLNIDEGIIFNKVVEDFDFRAVVSSLNELKGIEYEGQYIDKQYEEFDPGSAPLSQDRLWQAVESLTQSNETIVAEQGTSFFGASTIFLKSNSRFIGQPLWGSIGYTFPAALGSQIADKESRHLLFIGDGSLQLTVQELGLAIREKLNPICFIINNDGYTVEREIHGPTQSYNDIPMWNYSKLPETFGATEDRVVSKIVRTENEFVSVMKEAQADVNRMYWIELVLEKEDAPKLLKKMGKLFAEQNK

SEQ ID NO: 469 - DNA, 1641 bp, Artificial Sequence
  Variant of branched-chain keto acid decarboxylase (kdcA) from Lactococcus lactis
atgtacaccgttggcgactatctgctggaccgtctgcatgaactgggaattgaagaaatctttggcgtgccgggcgattacaatctgcaattcctggatcaaatcattgcgcgcgaagatatgaaatggattggtaacgcgaatgaactgaatgcgagctacatggctgatggctatgcacgtacgaagaaggcggcggcgttcctgacgaccttcggtgttggtgaactgagcgcaatcaatgggttggcgggcagctatgcagagaacctgccagtcgtggaaatcgttgggagtccgacctcgaaggtgcagaacgatggcaagttcgttcatcacaccctggccgacggcgacttcaagcacttctggaagatgcacgaaccggtcaccgctgcacgtacactgctgaccgccgagaacgcgaccacagagattgaccgcgtgctgagccggctgctgaaagaacgtaaacctgtgtacatcaacctgccggttgatgtcgccgcggcgaaagccgagaaaccagctctgagcctggagaaagaaagcagcacgttaaacaccacagaacaggtgatcctgtcgaagatcgaagaaagcctgaagaacgcccagaaaccggtcgtgatcgctgggcacgaggtgattagcttcggtctggagaagacggttacgcagtttgtgagtgaaaccaaactgccgattactaccctgaactttggcaaatcggctgtggatgaatccctgccgtccttcctgggtatctacaatggtaaactgagcgagattagcctcaagaactttgtggaaagcgcagacttcatcctgatgcttggtgtgaaactgacggatatcagtacgggcgcgtttacgcaccatctggacgagaacaagatgattagcctgaacattgatgaaggcatcatcttcaacaaagtcgtagaagacttcgatttcagcgcggttgttagcagcctgagcgagctgaaaggcattgaatacgaaggtcaatacattgataagcagtacgaagagttcgacccgggcagcgcaccactgagccaagaccgtctgtggcaagcagtagaatctctgacacagtccaatgaaaccattgtggcggaacagggcacgtcgttcttcggtgcctccaccatccccctgaagagcaattcacgcttcatcggtcagccgctttggggcagcatcggctatacgtttccggcagcactgggatcacagattgcggataaggaaagtcgccatctgctgttcattggtgatggtagcctgcaactgaccgtgcaggagctgggcctggcgatccgtgagaaactgaacccgatttgtttcatcatcaacaacgatggctataccgtagagcgcgagattcatgggcctacacagagctacaatgacatcccgatgtggaactatagcaaactgccggaaacctttggcgcgacggaagatcgcgtagttagcaagatcgttcgcacagagaacgagtttgtgagtgtcatgaaagaagcgcaggccgatgttaaccgcatgtattggattgaactggttctggagaaagaagatgcaccgaaactgctgaagaagatggggaagctgtttgcagaacagaacaaa

SEQ ID NO: 470 - protein, 547 aa, Artificial Sequence
  Variant of branched-chain keto acid decarboxylase (kdcA) from Lactococcus lactis
MYTVGDYLLDRLHELGIEEIFGVPGDYNLQFLDQIIAREDMKWIGNANELNASYMADGYARTKKAAAFLTTFGVGELSAINGLAGSYAENLPVVEIVGSPTSKVQNDGKFVHHTLADGDFKHFWKMHEPVTAARTLLTAENATTEIDRVLSRLLKERKPVYINLPVDVAAAKAEKPALSLEKESSTLNTTEQVILSKIEESLKNAQKPVVIAGHEVISFGLEKTVTQFVSETKLPITTLNFGKSAVDESLPSFLGIYNGKLSEISLKNFVESADFILMLGVKLTDISTGAFTHHLDENKMISLNIDEGIIFNKVVEDFDFSAVVSSLSELKGIEYEGQYIDKQYEEFDPGSAPLSQDRLWQAVESLTQSNETIVAEQGTSFFGASTIPLKSNSRFIGQPLWGSIGYTFPAALGSQIADKESRHLLFIGDGSLQLTVQELGLAIREKLNPICFIINNDGYTVEREIHGPTQSYNDIPMWNYSKLPETFGATEDRVVSKIVRTENEFVSVMKEAQADVNRMYWIELVLEKEDAPKLLKKMGKLFAEQNK

SEQ ID NO: 471 - DNA, 1641 bp, Artificial Sequence
  Variant of branched-chain keto acid decarboxylase (kdcA) from Lactococcus lactis
atgtacaccgttggcgactatctgctggaccgtctgcatgaactgggaattgaagaaatctttggcgtgccgggcgattacaatctgcaattcctggatcaaatcattgcgcgcgaagatatgaaatggattggtaacgcgaatgaactgaatgcgagctacatggctgatggctatgcacgtacgaagaaggcggcggcgttcctgacgaccttcggtgttggtgaactgagcgcaatcaatgggttggcgggcagctatgcagagaacctgccagtcgtggaaatcgttgggagtccgacctcgaaggtgcagaacgatggcaagttcgttcatcacaccctggccgacggcgacttcaagcacttctggaagatgcacgaaccggtcaccgctgcacgtacactgctgaccgccgagaacgcgaccacagagattgaccgcgtgctgagccggctgctgaaagaacgtaaacctgtgtacatcaacctgccggttgatgtcgccgcggcgaaagccgagaaaccagctctgagcctggagaaagaaagcagcacgttaaacaccacagaacaggtgatcctgtcgaagatcgaagaaagcctgaagaacgcccagaaaccggtcgtgatcgctgggcacgaggtgattagcttcggtctggagaagacggttacgcagtttgtgagtgaaaccaaactgccgattactaccctgaactttggcaaatcggctgtggatgaatccctgccgtccttcggcggtatctacaatggtaaactgagcgagattagcctcaagaactttgtggaaagcgcagacttcatcctgatgcttggtgtgaaactgacggatatcagtacgggcgcgtttacgcaccatctggacgagaacaagatgattagcctgaacattgatgaaggcatcatcttcaacaaagtcgtagaagacttcgatttccgcgcggttgttagcagcctgaatgagctgaaaggcattgaatacgaaggtcaatacattgataagcagtacgaagagttcattccgggcagcgcaccactgagccaagaccgtctgtggcaagcagtagaatctctgacacagtccaatgaaaccattgtggcggaacagggcacgtcgttcttcggtgcctccaccatccccctgaagagcaattcacgcttcatcggtcagccgctttggggcagcatcggctatacgtttccggcagcactgggatcacagattgcggataaggaaagtcgccatctgctgttcattggtgatggtagcctgcaactgaccgtgcaggagctgggcctggcgatccgtgagagactgaacccgatttgtttcatcatcaacaacgatggctataccgtagagcgcgagattcatgggcctacacagagctacaatgacatcccgatgtggaactatagcaaactgccggaaacctttggcgcgacggaagatcgcgtagttagcaagatcgttcgcacagagaacgagtttgtgagtgtcatgaaagaagcgcaggccgatgttaaccgcatgtattggattgaactggttctggagaaagaagatgcaccgaaactgctgaagaagatggggaagctgtttgcagaacagaacaaa

SEQ ID NO: 472 - protein, 547 aa, Artificial Sequence
  Variant of branched-chain keto acid decarboxylase (kdcA) from Lactococcus lactis
MYTVGDYLLDRLHELGIEEIFGVPGDYNLQFLDQIIAREDMKWIGNANELNASYMADGYARTKKAAAFLTTFGVGELSAINGLAGSYAENLPVVEIVGSPTSKVQNDGKFVHHTLADGDFKHFWKMHEPVTAARTLLTAENATTEIDRVLSRLLKERKPVYINLPVDVAAAKAEKPALSLEKESSTLNTTEQVILSKIEESLKNAQKPVVIAGHEVISFGLEKTVTQFVSETKLPITTLNFGKSAVDESLPSFGGIYNGKLSEISLKNFVESADFILMLGVKLTDISTGAFTHHLDENKMISLNIDEGIIFNKVVEDFDFRAVVSSLNELKGIEYEGQYIDKQYEEFIPGSAPLSQDRLWQAVESLTQSNETIVAEQGTSFFGASTIPLKSNSRFIGQPLWGSIGYTFPAALGSQIADKESRHLLFIGDGSLQLTVQELGLAIRERLNPICFIINNDGYTVEREIHGPTQSYNDIPMWNYSKLPETFGATEDRVVSKIVRTENEFVSVMKEAQADVNRMYWIELVLEKEDAPKLLKKMGKLFAEQNK

SEQ ID NO: 473 - DNA, 1641 bp, Artificial Sequence
  Variant of branched-chain keto acid decarboxylase (kdcA) from Lactococcus lactis
atgtacaccgttggcgactatctgctggaccgtctgcatgaactgggaattgaagaaatctttggcgtgccgggcgattacaatctgcaattcctggatcaaatcattgcgcgcgaagatatgaaatggattggtaacgcgaatgaactgaatgcgagctacatggctgatggctatgcacgtacgaagaaggcggcggcgttcctgacgaccttcggtgttggtgaactgagcgcaatcaatgggttggcgggcagctatgcagagaacctgccagtcgtggaaatcgttgggagtccgacctcgaaggtgcagaacgatggcaagttcgttcatcacaccctggccgacggcgacttcaagcacttctggaagatgcacgaaccggtcaccgctgcacgtacactgctgaccgccgagaacgcgaccacagagattgaccgcgtgctgagccagctgctgaaagaacgtaaacctgtgtacatcaacctgccggttgatgtcgccgcggcgaaagccgagaaaccagctctgagcctggagaaagaaagcagcacgttaaacaccacagaacaggtgatcctgtcgaagatcgaagaaagcctgaagaacgcccagaaaccggtcgtgatcgctgggcacgaggtgattagcttcggtctggagaagacggttacgcagtttgtgagtgaaaccaaactgccgattactaccctgaactttggcaaatcggctgtggatgaatccctgccgtccttcctgggtatctacaatggtaaactgagcgagattagcctcaagaactttgtggaaagcgcagacttcatcctgatgcttggtgtgaaactgacggatatcagtacgggcgcgtttacgcaccatctggacgagaacaagatgattagcctgaacattgatgaaggcatcatcttcaacaaagtcgtagaagacttcgatttccgtgcggttgttagcagcctgttagagctgaaaggcattgaatacgaaggtcaatacattgataagcagtacgaagagttcattccgggcagcaacccactgagccaagaccgtctgtggcaagcagtagaatctctgacacagtccaatgaaaccattgtggcggaacagggcacgtcgttcttcggtgcctccaccatcttcctgaagagcaattcacgcttcatcggtcagccgctttggggcagcatcggctatacgtttccggcagcactgggatcacagattgcggataaggaaagtcgccatctgctgttcattggtgatggtagcctgcaactgaccgtgcaggagctgggcctggcgatccgtgagagactgaacccgatttgtttcatcatcaacaacgatggctataccgtagagcgcgagattcatgggcctacacagagctacaatgacatcccgatgtggaactatagcaaactgccggaaacctttggcgcgacggaagatcgcgtagttagcaagatcgttcgcacagagaacgagtttgtgagtgtcatgaaagaagcgcaggccgatgttaaccgcatgtattggattgaactggttctggagaaagaagatgcaccgaaactgctgaagaagatggggaagctgtttgcagaacagaacaaa

SEQ ID NO: 474 - protein, 547 aa, Artificial Sequence
  Variant of branched-chain keto acid decarboxylase (kdcA) from Lactococcus lactis
MYTVGDYLLDRLHELGIEEIFGVPGDYNLQFLDQIIAREDMKWIGNANELNASYMADGYARTKKAAAFLTTFGVGELSAINGLAGSYAENLPVVEIVGSPTSKVQNDGKFVHHTLADGDFKHFWKMHEPVTAARTLLTAENATTEIDRVLSQLLKERKPVYINLPVDVAAAKAEKPALSLEKESSTLNTTEQVILSKIEESLKNAQKPVVIAGHEVISFGLEKTVTQFVSETKLPITTLNFGKSAVDESLPSFLGIYNGKLSEISLKNFVESADFILMLGVKLTDISTGAFTHHLDENKMISLNIDEGIIFNKVVEDFDFRAVVSSLLELKGIEYEGQYIDKQYEEFIPGSNPLSQDRLWQAVESLTQSNETIVAEQGTSFFGASTIFLKSNSRFIGQPLWGSIGYTFPAALGSQIADKESRHLLFIGDGSLQLTVQELGLAIRERLNPICFIINNDGYTVEREIHGPTQSYNDIPMWNYSKLPETFGATEDRVVSKIVRTENEFVSVMKEAQADVNRMYWIELVLEKEDAPKLLKKMGKLFAEQNK

SEQ ID NO: 475 - DNA, 1641 bp, Artificial Sequence
  Variant of branched-chain keto acid decarboxylase (kdcA) from Lactococcus lactis
atgtacaccgttggcgactatctgctggaccgtctgcatgaactgggaattgaagaaatctttggcgtgccgggcgattacaatctgcaattcctggatcaaatcattgcgcgcgaagatatgaaatggattggtaacgcgaatgaactgaatgcgagctacatggctgatggctatgcacgtacgaagaaggcggcggcgttcctgacgaccttcggtgttggtgaactgagcgcaatcaatgggttggcgggcagctatgcagagaacctgccagtcgtggaaatcgttgggagtccgacctcgaaggtgcagaacgatggcaagttcgttcatcacaccctggccgacggcgacttcaagcacttctggaagatgcacgaaccggtcaccgctgcacgtacactgctgaccgccgagaacgcgaccacagagattgaccgcgtgctgagccagctgctgaaagaacgtaaacctgtgtacatcaacctgccggttgatgtcgccgcggcgaaagccgagaaaccagctctgagcctggagaaagaaagcagcacgttaaacaccacagaacaggtgatcctgtcgaagatcgaagaaagcctgaagaacgcccagaaaccggtcgtgatcgctgggcacgaggtgattagcttcggtctggagaagacggttacgcagtttgtgagtgaaaccaaactgccgattactaccctgaactttggcaaatcggctgtggatgaatccctgccgtccttcctgggtatctacaatggtaaactgagcgagattagcctcaagaactttgtggaaagcgcagacttcatcctgatgcttggtgtgaaactgacggatatcagtacgggcgcgtttacgcaccatctggacgagaacaagatgattagcctgaacattgatgaaggcatcatcttcaacaaagtcgtagaagacttcgatttccgtgcggttgttagcagcctgaatgagctgaaaggcattgaatacgaaggtcaatacattgataagcagtacgaagagttcattccgagcagcgcaccactgagccaagaccgtctgtggcaagcagtagaatctctgacacagtccaatgaaaccattgtggcggaacagggcacgtcgttcttcggtgcctccaccatcttcctgaagagcaattcacgcttcatcggtcagccgctttggggcagcatcggctatacgtttccggcagcactgggatcacagattgcggataaggaaagtcgccatctgctgttcattggtgatggtagcctgcaactgaccgtgcaggagctgggcctggcgatccgtgagaaactgaacccgatttgtttcatcatcaacaacgatggctataccgtagagcgcgagattcatgggcctacacagagctacaatgacatcccgatgtggaactatagcaaactgccggaaacctttggcgcgacggaagatcgcgtagttagcaagatcgttcgcacagagaacgagtttgtgagtgtcatgaaagaagcgcaggccgatgttaaccgcatgtattggattgaactggttctggagaaagaagatgcaccgaaactgctgaagaagatggggaagctgtttgcagaacagaacaaa

SEQ ID NO: 476 - protein, 547 aa, Artificial Sequence
  Variant of branched-chain keto acid decarboxylase (kdcA) from Lactococcus lactis
MYTVGDYLLDRLHELGIEEIFGVPGDYNLQFLDQIIAREDMKWIGNANELNASYMADGYARTKKAAAFLTTFGVGELSAINGLAGSYAENLPVVEIVGSPTSKVQNDGKFVHHTLADGDFKHFWKMHEPVTAARTLLTAENATTEIDRVLSQLLKERKPVYINLPVDVAAAKAEKPALSLEKESSTLNTTEQVILSKIEESLKNAQKPVVIAGHEVISFGLEKTVTQFVSETKLPITTLNFGKSAVDESLPSFLGIYNGKLSEISLKNFVESADFILMLGVKLTDISTGAFTHHLDENKMISLNIDEGIIFNKVVEDFDFRAVVSSLNELKGIEYEGQYIDKQYEEFIPSSAPLSQDRLWQAVESLTQSNETIVAEQGTSFFGASTIFLKSNSRFIGQPLWGSIGYTFPAALGSQIADKESRHLLFIGDGSLQLTVQELGLAIREKLNPICFIINNDGYTVEREIHGPTQSYNDIPMWNYSKLPETFGATEDRVVSKIVRTENEFVSVMKEAQADVNRMYWIELVLEKEDAPKLLKKMGKLFAEQNK

SEQ ID NO: 477 - DNA, 1641 bp, Artificial Sequence
  Variant of branched-chain keto acid decarboxylase (kdcA) from Lactococcus lactis
atgtacaccgttggcgactatctgctggaccgtctgcatgaactgggaattgaagaaatctttggcgtgccgggcgattacaatctgcaattcctggatcaaatcattgcgcgcgaagatatgaaatggattggtaacgcgaatgaactgaatgcgagctacatggctgatggctatgcacgtacgaagaaggcggcggcgttcctgacgaccttcggtgttggtgaactgagcgcaatcaatgggttggcgggcagctatgcagagaacctgccagtcgtggaaatcgttgggagtccgacctcgaaggtgcagaacgatggcaagttcgttcatcacaccctggccgacggcgacttcaagcacttctggaagatgcacgaaccggtcaccgctgcacgtacactgctgaccgccgagaacgcgaccacagagattgaccgcgtgctgagccggctgctgaaagaacgtaaacctgtgtacatcaacctgccggttgatgtcgccgcggcgaaagccgagaaaccagctctgagcctggagaaagaaagcagcacgttaaacaccacagaacaggtgatcctgtcgaagatcgaagaaagcctgaagaacgcccagaaaccggtcgtgatcgctgggcacgaggtgattagcttcggtctggagaagacggttacgcagtttgcgagtgaaacccacctgccgattactaccctgaactttggcaaatcggctgtggatgaatccctgccgtccttcctgggtatctacaatggtaaactgagcgagattagcctcaagaactttgtggaaagcgcagacttcatcctgatgcttggtgtgaaactgacggatatcagtacgggcgcgtttacgcaccatctggacgagaacaagatgattagcctgaacattgatgaaggcatcatcttcaacaaagtcgtagaagacttcgatttcagcgcggttgttagcagcctgagcgagctgaaaggcattgaatacgaaggtcaatacattgataagcagtacgaagagttcattccgggcagcgcaccactgagccaagaccgtctgtggcaagcagtagaatctctgacacagtccaatgaaaccattgtggcggaacagggcacgtcgttcttcggtgcctccaccatcttcctgaagagcaattcacgcttcatcggtcagccgctttggggcagcatcggctatacgtttccggcagcactgggatcacagattgcggataaggaaagtcgccatctgctgttcattggtgatggtagcctgcaactgaccgtgcaggagctgggcctggcgatccgtgagaaactgaacccgatttgtttcatcatcaacaacgatggctataccgtagagcgcgagattcatgggcctacacagagctacaatgacatcccgatgtggaactatagcaaactgccggaaacctttggcgcgacggaagatcgcgtagttagcaagatcgttcgcacagagaacgagtttgtgagtgtcatgaaagaagcgcaggccgatgttaaccgcatgtattggattgaactggttctggagaaagaagatgcaccgaaactgctgaagaagatggggaagctgtttgcagaacagaacaaa

SEQ ID NO: 478 - protein, 547 aa, Artificial Sequence
  Variant of branched-chain keto acid decarboxylase (kdcA) from Lactococcus lactis
MYTVGDYLLDRLHELGIEEIFGVPGDYNLQFLDQIIAREDMKWIGNANELNASYMADGYARTKKAAAFLTTFGVGELSAINGLAGSYAENLPVVEIVGSPTSKVQNDGKFVHHTLADGDFKHFWKMHEPVTAARTLLTAENATTEIDRVLSRLLKERKPVYINLPVDVAAAKAEKPALSLEKESSTLNTTEQVILSKIEESLKNAQKPVVIAGHEVISFGLEKTVTQFASETHLPITTLNFGKSAVDESLPSFLGIYNGKLSEISLKNFVESADFILMLGVKLTDISTGAFTHHLDENKMISLNIDEGIIFNKVVEDFDFSAVVSSLSELKGIEYEGQYIDKQYEEFIPGSAPLSQDRLWQAVESLTQSNETIVAEQGTSFFGASTIFLKSNSRFIGQPLWGSIGYTFPAALGSQIADKESRHLLFIGDGSLQLTVQELGLAIREKLNPICFIINNDGYTVEREIHGPTQSYNDIPMWNYSKLPETFGATEDRVVSKIVRTENEFVSVMKEAQADVNRMYWIELVLEKEDAPKLLKKMGKLFAEQNK

SEQ ID NO: 479 - DNA, 1641 bp, Artificial Sequence
  Variant of branched-chain keto acid decarboxylase (kdcA) from Lactococcus lactis
atgtacaccgttggcgactatctgctggaccgtctgcatgaactgggaattgaagaaatctttggcgtgccgggcgattacaatctgcaattcctggatcaaatcattgcgcgcgaagatatgaaatggattggtaacgcgaatgaactgaatgcgagctacatggctgatggctatgcacgtacgaagaaggcggcggcgttcctgacgaccttcggtgttggtgaactgagcgcaatcaatgggttggcgggcagctatgcagagaacctgccagtcgtggaaatcgttgggagtccgacctcgaaggtgcagaacgatggcaagttcgttcatcacaccctggccgacggcgacttcaagcacttctggaagatgcacgaaccggtcaccgctgcacgtacactgctgaccgccgagaacgcgaccacagagattgaccgcgtgctgagccggctgctgaaagaacgtaaacctgtgtacatcaacctgccggttgatgtcgccgcggcgaaagccgagaaaccagctctgagcctggagaaagaaagcagcacgttaaacaccacagaacaggtgatcctgtcgaagatcgaagaaagcctgaagaacgcccagaaaccggtcgtgatcgctgggcacgaggtgattagcttcggtctggagaagacggttacgcagtttgcgagtgaaacccacctgccgattactaccctgaactttggcaaatcggctgtggatgaatccctgccgtccttcctaggtatctacaatggtaaactgagcgagattagcctcaagaactttgtggaaagcgcagacttcatcctgatgcttggtgtgaaactgacggatatcagtacgggcgcgtttacgcaccatctggacgagaacaagatgattagcctgaacattgatgaaggcatcatcttcaacaaagtcgtagaagacttcgatttcagcgcggttgttagcagcctgttagagctgaaaggcattgaatacgaaggtcaatacattgataagcagtacgaagagttcattccgagcagctacccactgagccaagaccgtctgtggcaagcagtagaatctctgacacagtccaatgaaaccattgtggcggaacagggcacgtcgttcttcggtgcctccaccatcttcctgaagagcaattcacgcttcatcggtcagccgctttggggcagcatcggctatacgtttccggcagcactgggatcacagattgcggataaggaaagtcgccatctgctgttcattggtgatggtagcctgcaactgaccgtgcaggagctgggcctggcgatccgtgagagactgaacccgatttgtttcatcatcaacaacgatggctataccgtagagcgcgagattcatgggcctacacagagctacaatgacatcccgatgtggaactatagcaaactgccggaaacctttggcgcgacggaagatcgcgtagttagcaagatcgttcgcacagagaacgagtttgtgagtgtcatgaaagaagcgcaggccgatgttaaccgcatgtattggattgaactggttctggagaaagaagatgcaccgaaactgctgaagaagatggggaagctgtttgcagaacagaacaaa

SEQ ID NO: 480 - protein, 547 aa, Artificial Sequence
  Variant of branched-chain keto acid decarboxylase (kdcA) from Lactococcus lactis
MYTVGDYLLDRLHELGIEEIFGVPGDYNLQFLDQIIAREDMKWIGNANELNASYMADGYARTKKAAAFLTTFGVGELSAINGLAGSYAENLPVVEIVGSPTSKVQNDGKFVHHTLADGDFKHFWKMHEPVTAARTLLTAENATTEIDRVLSRLLKERKPVYINLPVDVAAAKAEKPALSLEKESSTLNTTEQVILSKIEESLKNAQKPVVIAGHEVISFGLEKTVTQFASETHLPITTLNFGKSAVDESLPSFLGIYNGKLSEISLKNFVESADFILMLGVKLTDISTGAFTHHLDENKMISLNIDEGIIFNKVVEDFDFSAVVSSLLELKGIEYEGQYIDKQYEEFIPSSYPLSQDRLWQAVESLTQSNETIVAEQGTSFFGASTIFLKSNSRFIGQPLWGSIGYTFPAALGSQIADKESRHLLFIGDGSLQLTVQELGLAIRERLNPICFIINNDGYTVEREIHGPTQSYNDIPMWNYSKLPETFGATEDRVVSKIVRTENEFVSVMKEAQADVNRMYWIELVLEKEDAPKLLKKMGKLFAEQNK

SEQ ID NO: 481 - DNA, 1641 bp, Artificial Sequence
  Variant of branched-chain keto acid decarboxylase (kdcA) from Lactococcus lactis
atgtacaccgttggcgactatctgctggaccgtctgcatgaactgggaattgaagaaatctttggcgtgccgggcgattacaatctgcaattcctggatcaaatcattgcgcgcgaagatatgaaatggattggtaacgcgaatgaactgaatgcgagctacatggctgatggctatgcacgtacgaagaaggcggcggcgttcctgacgaccttcggtgttggtgaactgagcgcaatcaatgggttggcgggcagctatgcagagaacctgccagtcgtggaaatcgttgggagtccgacctcgaaggtgcagaacgatggcaagttcgttcatcacaccctggccgacggcgacttcaagcacttcatgaagatgcacgaaccggtcaccgctgcacgtacactgctgaccgccgagaacgcgaccacagagattgaccgcgtgctgagccagctgctgaaagaacgtaaacctgtgtacatcaacctgccggttgatgtcgccgcggcgaaagccgagaaaccagctctgagcctggagaaagaaagcagcacgttaaacaccacagaacaggtgatcctgtcgaagatcgaagaaagcctgaagaacgcccagaaaccggtcgtgatcgctgggcacgaggtgattagcttcggtctggagaagacggttacgcagtttgtgagtgaaaccaaactgccgattactaccctgaactttggcaaatcggctgtggatgaatccctgccgtccttcctaggtatctacaatggtaaactgagcgagattagcctcaagaactttgtggaaagcgcagacttcatcctgatgcttggtgtgaaactgacggatatcagtacgggcgcgtttacgcaccatctggacgagaacaagatgattagcctgaacattgatgaaggcatcatcttcaacaaagtcgtagaagacttcgatttcagcgcggttgttagcagcctgtcagagctgaaaggcattgaatacgaaggtcaatacattgataagcagtacgaagagttcattccgggcagcaacccactgagccaagaccgtctgtggcaagcagtagaatctctgacacagtccaatgaaaccattgtggcggaacagggcacgtcgttcttcggtgcctccaccatcttcctgaagagcaattcacgcttcatcggtcagccgctttggggcagcatcggctatacgtttccggcagcactgggatcacagattgcggataaggaaagtcgccatctgctgttcattggtgatggtagcctgcaactgaccgtgcaggagctgggcctggcgatccgtgagagactgaacccgatttgtttcatcatcaacaacgatggctataccgtagagcgcgagattcatgggcctacacagagctacaatgacatcccgatgtggaactatagcaaactgccggaaacctttggcgcgacggaagatcgcgtagttagcaagatcgttcgcacagagaacgagtttgtgagtgtcatgaaagaagcgcaggccgatgttaaccgcatgtattggattgaactggttctggagaaagaagatgcaccgaaactgctgaagaagatggggaagctgtttgcagaacagaacaaa

SEQ ID NO: 482 - protein, 547 aa, Artificial Sequence
  Variant of branched-chain keto acid decarboxylase (kdcA) from Lactococcus lactis
MYTVGDYLLDRLHELGIEEIFGVPGDYNLQFLDQIIAREDMKWIGNANELNASYMADGYARTKKAAAFLTTFGVGELSAINGLAGSYAENLPVVEIVGSPTSKVQNDGKFVHHTLADGDFKHFMKMHEPVTAARTLLTAENATTEIDRVLSQLLKERKPVYINLPVDVAAAKAEKPALSLEKESSTLNTTEQVILSKIEESLKNAQKPVVIAGHEVISFGLEKTVTQFVSETKLPITTLNFGKSAVDESLPSFLGIYNGKLSEISLKNFVESADFILMLGVKLTDISTGAFTHHLDENKMISLNIDEGIIFNKVVEDFDFSAVVSSLSELKGIEYEGQYIDKQYEEFIPGSNPLSQDRLWQAVESLTQSNETIVAEQGTSFFGASTIFLKSNSRFIGQPLWGSIGYTFPAALGSQIADKESRHLLFIGDGSLQLTVQELGLAIRERLNPICFIINNDGYTVEREIHGPTQSYNDIPMWNYSKLPETFGATEDRVVSKIVRTENEFVSVMKEAQADVNRMYWIELVLEKEDAPKLLKKMGKLFAEQNK

SEQ ID NO: 483 - DNA, 1641 bp, Artificial Sequence
  Variant of branched-chain keto acid decarboxylase (kdcA) from Lactococcus lactis
atgtacaccgttggcgactatctgctggaccgtctgcatgaactgggaattgaagaaatctttggcgtgccgggcgattacaatctgcaattcctggatcaaatcattgcgcgcgaagatatgaaatggattggtaacgcgaatgaactgaatgcgagctacatggctgatggctatgcacgtacgaagaaggcggcggcgttcctgacgaccttcggtgttggtgaactgagcgcaatcaatgggttggcgggcagctatgcagagaacctgccagtcgtggaaatcgttgggagtccgacctcgaaggtgcagaacgatggcaagttcgttcatcacaccctggccgacggcgacttcaagcacttcatgaagatgcacgaaccggtcaccgctgcacgtacactgctgaccgccgagaacgcgaccacagagattgaccgcgtgctgagccggctgctgaaagaacgtaaacctgtgtacatcaacctgccggttgatgtcgccgcggcgaaagccgagaaaccagctctgagcctggagaaagaaagcagcacgttaaacaccacagaacaggtgatcctgtcgaagatcgaagaaagcctgaagaacgcccagaaaccggtcgtgatcgctgggcacgaggtgattagcttcggtctggagaagacggttacgcagtttgcgagtgaaacccacctgccgattactaccctgaactttggcaaatcggctgtggatgaatccctgccgtccttcctaggtatctacaatggtaaactgagcgagattagcctcaagaactttgtggaaagcgcagacttcatcctgatgcttggtgtgaaactgacggatatcagtacgggcgcgtttacgcaccatctggacgagaacaagatgattagcctgaacattgatgaaggcatcatcttcaacaaagtcgtagaagacttcgatttccgcgcggttgttagcagcctgagcgagctgaaaggcattgaatacgaaggtcaatacattgataagcagtacgaagagttcgacccgggcagcaacccactgagccaagaccgtctgtggcaagcagtagaatctctgacacagtccaatgaaaccattgtggcggaacagggcacgtcgttcttcggtgcctccaccatcttcctgaagagcaattcacgcttcatcggtcagccgctttggggcagcatcggctatacgtttccggcagcactgggatcacagattgcggataaggaaagtcgccatctgctgttcattggtgatggtagcctgcaactgaccgtgcaggagctgggcctggcgatccgtgagaaactgaacccgatttgtttcatcatcaacaacgatggctataccgtagagcgcgagattcatgggcctacacagagctacaatgacatcccgatgtggaactatagcaaactgccggaaacctttggcgcgacggaagatcgcgtagttagcaagatcgttcgcacagagaacgagtttgtgagtgtcatgaaagaagcgcaggccgatgttaaccgcatgtattggattgaactggttctggagaaagaagatgcaccgaaactgctgaagaagatggggaagctgtttgcagaacagaacaaa

SEQ ID NO: 484 - protein, 547 aa, Artificial Sequence
  Variant of branched-chain keto acid decarboxylase (kdcA) from Lactococcus lactis
MYTVGDYLLDRLHELGIEEIFGVPGDYNLQFLDQIIAREDMKWIGNANELNASYMADGYARTKKAAAFLTTFGVGELSAINGLAGSYAENLPVVEIVGSPTSKVQNDGKFVHHTLADGDFKHFMKMHEPVTAARTLLTAENATTEIDRVLSRLLKERKPVYINLPVDVAAAKAEKPALSLEKESSTLNTTEQVILSKIEESLKNAQKPVVIAGHEVISFGLEKTVTQFASETHLPITTLNFGKSAVDESLPSFLGIYNGKLSEISLKNFVESADFILMLGVKLTDISTGAFTHHLDENKMISLNIDEGIIFNKVVEDFDFRAVVSSLSELKGIEYEGQYIDKQYEEFDPGSNPLSQDRLWQAVESLTQSNETIVAEQGTSFFGASTIFLKSNSRFIGQPLWGSIGYTFPAALGSQIADKESRHLLFIGDGSLQLTVQELGLAIREKLNPICFIINNDGYTVEREIHGPTQSYNDIPMWNYSKLPETFGATEDRVVSKIVRTENEFVSVMKEAQADVNRMYWIELVLEKEDAPKLLKKMGKLFAEQNK

SEQ ID NO: 485 - DNA, 1641 bp, Artificial Sequence
  Variant of branched-chain keto acid decarboxylase (kdcA) from Lactococcus lactis
atgtacaccgttggcgactatctgctggaccgtctgcatgaactgggaattgaagaaatctttggcgtgccgggcgattacaatctgcaattcctggatcaaatcattgcgcgcgaagatatgaaatggattggtaacgcgaatgaactgaatgcgagctacatggctgatggctatgcacgtacgaagaaggcggcggcgttcctgacgaccttcggtgttggtgaactgagcgcaatcaatgggttggcgggcagctatgcagagaacctgccagtcgtggaaatcgttgggagtccgacctcgaaggtgcagaacgatggcaagttcgttcatcacaccctggccgacggcgacttcaagcacttcatgaagatgcacgaaccggtcaccgctgcacgtacactgctgaccgccgagaacgcgaccacagagattgaccgcgtgctgagccagctgctgaaagaacgtaaacctgtgtacatcaacctgccggttgatgtcgccgcggcgaaagccgagaaaccagctctgagcctggagaaagaaagcagcacgttaaacaccacagaacaggtgatcctgtcgaagatcgaagaaagcctgaagaacgcccagaaaccggtcgtgatcgctgggcacgaggtgattagcttcggtctggagaagacggttacgcagtttgtgagtgaaacccacctgccgattactaccctgaactttggcaaatcggctgtggatgaatccctgccgtccttcggcggtatctacaatggtaaactgagcgagattagcctcaagaactttgtggaaagcgcagacttcatcctgatgcttggtgtgaaactgacggatatcagtacgggcgcgtttacgcaccatctggacgagaacaagatgattagcctgaacattgatgaaggcatcatcttcaacaaagtcgtagaagacttcgatttccgcgcggttgttagcagcctgagcgagctgaaaggcattgaatacgaaggtcaatacattgataagcagtacgaagagttcgacccgagcagcgcaccactgagccaagaccgtctgtggcaagcagtagaatctctgacacagtccaatgaaaccattgtggcggaacagggcacgtcgttcttcggtgcctccaccatcttcctgaagagcaattcacgcttcatcggtcagccgctttggggcagcatcggctatacgtttccggcagcactgggatcacagattgcggataaggaaagtcgccatctgctgttcattggtgatggtagcctgcaactgaccgtgcaggagctgggcctggcgatccgtgagaaactgaacccgatttgtttcatcatcaacaacgatggctataccgtagagcgcgagattcatgggcctacacagagctacaatgacatcccgatgtggaactatagcaaactgccggaaacctttggcgcgacggaagatcgcgtagttagcaagatcgttcgcacagagaacgagtttgtgagtgtcatgaaagaagcgcaggccgatgttaaccgcatgtattggattgaactggttctggagaaagaagatgcaccgaaactgctgaagaagatggggaagctgtttgcagaacagaacaaa

SEQ ID NO: 486 - protein, 547 aa, Artificial Sequence
  Variant of branched-chain keto acid decarboxylase (kdcA) from Lactococcus lactis
MYTVGDYLLDRLHELGIEEIFGVPGDYNLQFLDQIIAREDMKWIGNANELNASYMADGYARTKKAAAFLTTFGVGELSAINGLAGSYAENLPVVEIVGSPTSKVQNDGKFVHHTLADGDFKHFMKMHEPVTAARTLLTAENATTEIDRVLSQLLKERKPVYINLPVDVAAAKAEKPALSLEKESSTLNTTEQVILSKIEESLKNAQKPVVIAGHEVISFGLEKTVTQFVSETHLPITTLNFGKSAVDESLPSFGGIYNGKLSEISLKNFVESADFILMLGVKLTDISTGAFTHHLDENKMISLNIDEGIIFNKVVEDFDFRAVVSSLSELKGIEYEGQYIDKQYEEFDPSSAPLSQDRLWQAVESLTQSNETIVAEQGTSFFGASTIFLKSNSRFIGQPLWGSIGYTFPAALGSQIADKESRHLLFIGDGSLQLTVQELGLAIREKLNPICFIINNDGYTVEREIHGPTQSYNDIPMWNYSKLPETFGATEDRVVSKIVRTENEFVSVMKEAQADVNRMYWIELVLEKEDAPKLLKKMGKLFAEQNK

SEQ ID NO: 487 - DNA, 1641 bp, Artificial Sequence
  Variant of branched-chain keto acid decarboxylase (kdcA) from Lactococcus lactis
atgtacaccgttggcgactatctgctggaccgtctgcatgaactgggaattgaagaaatctttggcgtgccgggcgattacaatctgcaattcctggatcaaatcattgcgcgcgaagatatgaaatggattggtaacgcgaatgaactgaatgcgagctacatggctgatggctatgcacgtacgaagaaggcggcggcgttcctgacgaccttcggtgttggtgaactgagcgcaatcaatgggttggcgggcagctatgcagagaacctgccagtcgtggaaatcgttgggagtccgacctcgaaggtgcagaacgatggcaagttcgttcatcacaccctggccgacggcgacttcaagcacttctggaagatgcacgaaccggtcaccgctgcacgtacactgctgaccgccgagaacgcgaccacagagattgaccgcgtgctgagccagctgctgaaagaacgtaaacctgtgtacatcaacctgccggttgatgtcgccgcggcgaaagccgagaaaccagctctgagcctggagaaagaaagcagcacgttaaacaccacagaacaggtgatcctgtcgaagatcgaagaaagcctgaagaacgcccagaaaccggtcgtgatcgctgggcacgaggtgattagcttcggtctggagaagacggttacgcagtttgtgagtgaaaccaaactgccgattactaccctgaactttggcaaatcggctgtggatgaatccctgccgtccttcctgggtatctacaatggtaaactgagcgagattagcctcaagaactttgtggaaagcgcagacttcatcctgatgcttggtgtgaaactgacggatatcagtacgggcgcgtttacgcaccatctggacgagaacaagatgattagcctgaacattgatgaaggcatcatcttcaacaaagtcgtagaagacttcgatttccgcgcggttgttagcagcctgttagagctgaaaggcattgaatacgaaggtcaatacattgataagcagtacgaagagttcgacccgagcagcaacccactgagccaagaccgtctgtggcaagcagtagaatctctgacacagtccaatgaaaccattgtggcggaacagggcacgtcgttcttcggtgcctccaccatccccctgaagagcaattcacgcttcatcggtcagccgctttggggcagcatcggctatacgtttccggcagcactgggatcacagattgcggataaggaaagtcgccatctgctgttcattggtgatggtagcctgcaactgaccgtgcaggagctgggcctggcgatccgtgagaaactgaacccgatttgtttcatcatcaacaacgatggctataccgtagagcgcgagattcatgggcctacacagagctacaatgacatcccgatgtggaactatagcaaactgccggaaacctttggcgcgacggaagatcgcgtagttagcaagatcgttcgcacagagaacgagtttgtgagtgtcatgaaagaagcgcaggccgatgttaaccgcatgtattggattgaactggttctggagaaagaagatgcaccgaaactgctgaagaagatggggaagctgtttgcagaacagaacaaa

SEQ ID NO: 488 - protein, 547 aa, Artificial Sequence
  Variant of branched-chain keto acid decarboxylase (kdcA) from Lactococcus lactis
MYTVGDYLLDRLHELGIEEIFGVPGDYNLQFLDQIIAREDMKWIGNANELNASYMADGYARTKKAAAFLTTFGVGELSAINGLAGSYAENLPVVEIVGSPTSKVQNDGKFVHHTLADGDFKHFWKMHEPVTAARTLLTAENATTEIDRVLSQLLKERKPVYINLPVDVAAAKAEKPALSLEKESSTLNTTEQVILSKIEESLKNAQKPVVIAGHEVISFGLEKTVTQFVSETKLPITTLNFGKSAVDESLPSFLGIYNGKLSEISLKNFVESADFILMLGVKLTDISTGAFTHHLDENKMISLNIDEGIIFNKVVEDFDFRAVVSSLLELKGIEYEGQYIDKQYEEFDPSSNPLSQDRLWQAVESLTQSNETIVAEQGTSFFGASTIPLKSNSRFIGQPLWGSIGYTFPAALGSQIADKESRHLLFIGDGSLQLTVQELGLAIREKLNPICFIINNDGYTVEREIHGPTQSYNDIPMWNYSKLPETFGATEDRVVSKIVRTENEFVSVMKEAQADVNRMYWIELVLEKEDAPKLLKKMGKLFAEQNK

SEQ ID NO: 489 - DNA, 1641 bp, Artificial Sequence
  Variant of branched-chain keto acid decarboxylase (kdcA) from Lactococcus lactis
atgtacaccgttggcgactatctgctggaccgtctgcatgaactgggaattgaagaaatctttggcgtgccgggcgattacaatctgcaattcctggatcaaatcattgcgcgcgaagatatgaaatggattggtaacgcgaatgaactgaatgcgagctacatggctgatggctatgcacgtacgaagaaggcggcggcgttcctgacgaccttcggtgttggtgaactgagcgcaatcaatgggttggcgggcagctatgcagagaacctgccagtcgtggaaatcgttgggagtccgacctcgaaggtgcagaacgatggcaagttcgttcatcacaccctggccgacggcgacttcaagcacttcatgaagatgcacgaaccggtcaccgctgcacgtacactgctgaccgccgagaacgcgaccacagagattgaccgcgtgctgagccaactgctgaaagaacgtaaacctgtgtacatcaacctgccggttgatgtcgccgcggcgaaagccgagaaaccagctctgagcctggagaaagaaagcagcacgttaaacaccacagaacaggtgatcctgtcgaagatcgaagaaagcctgaagaacgcccagaaaccggtcgtgatcgctgggcacgaggtgattagcttcggtctggagaagacggttacgcagtttgcgagtgaaaccaaactgccgattactaccctgaactttggcaaatcggctgtggatgaatccctgccgtccttcctgggtatctacaatggtaaactgagcgagattagcctcaagaactttgtggaaagcgcagacttcatcctgatgcttggtgtgaaactgacggatatcagtacgggcgcgtttacgcaccatctggacgagaacaagatgattagcctgaacattgatgaaggcatcatcttcaacaaagtcgtagaagacttcgatttcagcgcggttgttagcagcctgagcgagctgaaaggcattgaatacgaaggtcaatacattgataagcagtacgaagagttcattccgagcagcgcaccactgagccaagaccgtctgtggcaagcagtagaatctctgacacagtccaatgaaaccattgtggcggaacagggcacgtcgttcttcggtgcctccaccatcttcctgaagagcaattcacgcttcatcggtcagccgctttggggcagcatcggctatacgtttccggcagcactgggatcacagattgcggataaggaaagtcgccatctgctgttcattggtgatggtagcctgcaactgaccgtgcaggagctgggcctggcgatccgtgagagactgaacccgatttgtttcatcatcaacaacgatggctataccgtagagcgcgagattcatgggcctacacagagctacaatgacatcccgatgtggaactatagcaaactgccggaaacctttggcgcgacggaagatcgcgtagttagcaagatcgttcgcacagagaacgagtttgtgagtgtcatgaaagaagcgcaggccgatgttaaccgcatgtattggattgaactggttctggagaaagaagatgcaccgaaactgctgaagaagatggggaagctgtttgcagaacagaacaaa

SEQ ID NO: 490 - protein, 547 aa, Artificial Sequence
  Variant of branched-chain keto acid decarboxylase (kdcA) from Lactococcus lactis
MYTVGDYLLDRLHELGIEEIFGVPGDYNLQFLDQIIAREDMKWIGNANELNASYMADGYARTKKAAAFLTTFGVGELSAINGLAGSYAENLPVVEIVGSPTSKVQNDGKFVHHTLADGDFKHFMKMHEPVTAARTLLTAENATTEIDRVLSQLLKERKPVYINLPVDVAAAKAEKPALSLEKESSTLNTTEQVILSKIEESLKNAQKPVVIAGHEVISFGLEKTVTQFASETKLPITTLNFGKSAVDESLPSFLGIYNGKLSEISLKNFVESADFILMLGVKLTDISTGAFTHHLDENKMISLNIDEGIIFNKVVEDFDFSAVVSSLSELKGIEYEGQYIDKQYEEFIPSSAPLSQDRLWQAVESLTQSNETIVAEQGTSFFGASTIFLKSNSRFIGQPLWGSIGYTFPAALGSQIADKESRHLLFIGDGSLQLTVQELGLAIRERLNPICFIINNDGYTVEREIHGPTQSYNDIPMWNYSKLPETFGATEDRVVSKIVRTENEFVSVMKEAQADVNRMYWIELVLEKEDAPKLLKKMGKLFAEQNK

SEQ ID NO: 491 - DNA, 1641 bp, Artificial Sequence
  Variant of branched-chain keto acid decarboxylase (kdcA) from Lactococcus lactis
atgtacaccgttggcgactatctgctggaccgtctgcatgaactgggaattgaagaaatctttggcgtgccgggcgattacaatctgcaattcctggatcaaatcattgcgcgcgaagatatgaaatggattggtaacgcgaatgaactgaatgcgagctacatggctgatggctatgcacgtacgaagaaggcggcggcgttcctgacgaccttcggtgttggtgaactgagcgcaatcaatgggttggcgggcagctatgcagagaacctgccagtcgtggaaatcgttgggagtccgacctcgaaggtgcagaacgatggcaagttcgttcatcacaccctggccgacggcgacttcaagcacttcatgaagatgcacgaaccggtcaccgctgcacgtacactgctgaccgccgagaacgcgaccacagagattgaccgcgtgctgagccggctgctgaaagaacgtaaacctgtgtacatcaacctgccggttgatgtcgccgcggcgaaagccgagaaaccagctctgagcctggagaaagaaagcagcacgttaaacaccacagaacaggtgatcctgtcgaagatcgaagaaagcctgaagaacgcccagaaaccggtcgtgatcgctgggcacgaggtgattagcttcggtctggagaagacggttacgcagtttgtgagtgaaaccaaactgccgattactaccctgaactttggcaaatcggctgtggatgaatccctgccgtccttcggcggtatctacaatggtaaactgagcgagattagcctcaagaactttgtggaaagcgcagacttcatcctgatgcttggtgtgaaactgacggatatcagtacgggcgcgtttacgcaccatctggacgagaacaagatgattagcctgaacattgatgaaggcatcatcttcaacaaagtcgtagaagacttcgatttcagcgcggttgttagcagcctgagcgagctgaaaggcattgaatacgaaggtcaatacattgataagcagtacgaagagttcgacccgagcagcgcaccactgagccaagaccgtctgtggcaagcagtagaatctctgacacagtccaatgaaaccattgtggcggaacagggcacgtcgttcttcggtgcctccaccatcttcctgaagagcaattcacgcttcatcggtcagccgctttggggcagcatcggctatacgtttccggcagcactgggatcacagattgcggataaggaaagtcgccatctgctgttcattggtgatggtagcctgcaactgaccgtgcaggagctgggcctggcgatccgtgagaaactgaacccgatttgtttcatcatcaacaacgatggctataccgtagagcgcgagattcatgggcctacacagagctacaatgacatcccgatgtggaactatagcaaactgccggaaacctttggcgcgacggaagatcgcgtagttagcaagatcgttcgcacagagaacgagtttgtgagtgtcatgaaagaagcgcaggccgatgttaaccgcatgtattggattgaactggttctggagaaagaagatgcaccgaaactgctgaagaagatggggaagctgtttgcagaacagaacaaa

SEQ ID NO: 492 - protein, 547 aa, Artificial Sequence
  Variant of branched-chain keto acid decarboxylase (kdcA) from Lactococcus lactis
MYTVGDYLLDRLHELGIEEIFGVPGDYNLQFLDQIIAREDMKWIGNANELNASYMADGYARTKKAAAFLTTFGVGELSAINGLAGSYAENLPVVEIVGSPTSKVQNDGKFVHHTLADGDFKHFMKMHEPVTAARTLLTAENATTEIDRVLSRLLKERKPVYINLPVDVAAAKAEKPALSLEKESSTLNTTEQVILSKIEESLKNAQKPVVIAGHEVISFGLEKTVTQFVSETKLPITTLNFGKSAVDESLPSFGGIYNGKLSEISLKNFVESADFILMLGVKLTDISTGAFTHHLDENKMISLNIDEGIIFNKVVEDFDFSAVVSSLSELKGIEYEGQYIDKQYEEFDPSSAPLSQDRLWQAVESLTQSNETIVAEQGTSFFGASTIFLKSNSRFIGQPLWGSIGYTFPAALGSQIADKESRHLLFIGDGSLQLTVQELGLAIREKLNPICFIINNDGYTVEREIHGPTQSYNDIPMWNYSKLPETFGATEDRVVSKIVRTENEFVSVMKEAQADVNRMYWIELVLEKEDAPKLLKKMGKLFAEQNK

SEQ ID NO: 493 - DNA, 1641 bp, Artificial Sequence
  Variant of branched-chain keto acid decarboxylase (kdcA) from Lactococcus lactis
atgtacaccgttggcgactatctgctggaccgtctgcatgaactgggaattgaagaaatctttggcgtgccgggcgattacaatctgcaattcctggatcaaatcattgcgcgcgaagatatgaaatggattggtaacgcgaatgaactgaatgcgagctacatggctgatggctatgcacgtacgaagaaggcggcggcgttcctgacgaccttcggtgttggtgaactgagcgcaatcaatgggttggcgggcagctatgcagagaacctgccagtcgtggaaatcgttgggagtccgacctcgaaggtgcagaacgatggcaagttcgttcatcacaccctggccgacggcgacttcaagcacttctggaagatgcacgaaccggtcaccgctgcacgtacactgctgaccgccgagaacgcgaccacagagattgaccgcgtgctgagccagctgctgaaagaacgtaaacctgtgtacatcaacctgccggttgatgtcgccgcggcgaaagccgagaaaccagctctgagcctggagaaagaaagcagcacgttaaacaccacagaacaggtgatcctgtcgaagatcgaagaaagcctgaagaacgcccagaaaccggtcgtgatcgctgggcacgaggtgattagcttcggtctggagaagacggttacgcagtttgtgagtgaaaccaaactgccgattactaccctgaactttggcaaatcggctgtggatgaatccctgccgtccttcctaggtatctacaatggtaaactgagcgagattagcctcaagaactttgtggaaagcgcagacttcatcctgatgcttggtgtgaaactgacggatatcagtacgggcgcgtttacgcaccatctggacgagaacaagatgattagcctgaacattgatgaaggcatcatcttcaacaaagtcgtagaagacttcgatttccgtgcggttgttagcagcctgttagagctgaaaggcattgaatacgaaggtcaatacattgataagcagtacgaagagttcgacccgggcagctacccactgagccaagaccgtctgtggcaagcagtagaatctctgacacagtccaatgaaaccattgtggcggaacagggcacgtcgttcttcggtgcctccaccatccccctgaagagcaattcacgcttcatcggtcagccgctttggggcagcatcggctatacgtttccggcagcactgggatcacagattgcggataaggaaagtcgccatctgctgttcattggtgatggtagcctgcaactgaccgtgcaggagctgggcctggcgatccgtgagaaactgaacccgatttgtttcatcatcaacaacgatggctataccgtagagcgcgagattcatgggcctacacagagctacaatgacatcccgatgtggaactatagcaaactgccggaaacctttggcgcgacggaagatcgcgtagttagcaagatcgttcgcacagagaacgagtttgtgagtgtcatgaaagaagcgcaggccgatgttaaccgcatgtattggattgaactggttctggagaaagaagatgcaccgaaactgctgaagaagatggggaagctgtttgcagaacagaacaaa

SEQ ID NO: 494 - protein, 547 aa, Artificial Sequence
  Variant of branched-chain keto acid decarboxylase (kdcA) from Lactococcus lactis
MYTVGDYLLDRLHELGIEEIFGVPGDYNLQFLDQIIAREDMKWIGNANELNASYMADGYARTKKAAAFLTTFGVGELSAINGLAGSYAENLPVVEIVGSPTSKVQNDGKFVHHTLADGDFKHFWKMHEPVTAARTLLTAENATTEIDRVLSQLLKERKPVYINLPVDVAAAKAEKPALSLEKESSTLNTTEQVILSKIEESLKNAQKPVVIAGHEVISFGLEKTVTQFVSETKLPITTLNFGKSAVDESLPSFLGIYNGKLSEISLKNFVESADFILMLGVKLTDISTGAFTHHLDENKMISLNIDEGIIFNKVVEDFDFRAVVSSLLELKGIEYEGQYIDKQYEEFDPGSYPLSQDRLWQAVESLTQSNETIVAEQGTSFFGASTIPLKSNSRFIGQPLWGSIGYTFPAALGSQIADKESRHLLFIGDGSLQLTVQELGLAIREKLNPICFIINNDGYTVEREIHGPTQSYNDIPMWNYSKLPETFGATEDRVVSKIVRTENEFVSVMKEAQADVNRMYWIELVLEKEDAPKLLKKMGKLFAEQNK

SEQ ID NO: 495 - DNA, 1641 bp, Artificial Sequence
  Variant of branched-chain keto acid decarboxylase (kdcA) from Lactococcus lactis
atgtacaccgttggcgactatctgctggaccgtctgcatgaactgggaattgaagaaatctttggcgtgccgggcgattacaatctgcaattcctggatcaaatcattgcgcgcgaagatatgaaatggattggtaacgcgaatgaactgaatgcgagctacatggctgatggctatgcacgtacgaagaaggcggcggcgttcctgacgaccttcggtgttggtgaactgagcgcaatcaatgggttggcgggcagctatgcagagaacctgccagtcgtggaaatcgttgggagtccgacctcgaaggtgcagaacgatggcaagttcgttcatcacaccctggccgacggcgacttcaagcacttctggaagatgcacgaaccggtcaccgctgcacgtacactgctgaccgccgagaacgcgaccacagagattgaccgcgtgctgagccaactgctgaaagaacgtaaacctgtgtacatcaacctgccggttgatgtcgccgcggcgaaagccgagaaaccagctctgagcctggagaaagaaagcagcacgttaaacaccacagaacaggtgatcctgtcgaagatcgaagaaagcctgaagaacgcccagaaaccggtcgtgatcgctgggcacgaggtgattagcttcggtctggagaagacggttacgcagtttgtgagtgaaaccaaactgccgattactaccctgaactttggcaaatcggctgtggatgaatccctgccgtccttcctaggtatctacaatggtaaactgagcgagattagcctcaagaactttgtggaaagcgcagacttcatcctgatgcttggtgtgaaactgacggatatcagtacgggcgcgtttacgcaccatctggacgagaacaagatgattagcctgaacattgatgaaggcatcatcttcaacaaagtcgtagaagacttcgatttccgcgcggttgttagcagcctgttagagctgaaaggcattgaatacgaaggtcaatacattgataagcagtacgaagagttcattccgagcagctacccactgagccaagaccgtctgtggcaagcagtagaatctctgacacagtccaatgaaaccattgtggcggaacagggcacgtcgttcttcggtgcctccaccatccccctgaagagcaattcacgcttcatcggtcagccgctttggggcagcatcggctatacgtttccggcagcactgggatcacagattgcggataaggaaagtcgccatctgctgttcattggtgatggtagcctgcaactgaccgtgcaggagctgggcctggcgatccgtgagaaactgaacccgatttgtttcatcatcaacaacgatggctataccgtagagcgcgagattcatgggcctacacagagctacaatgacatcccgatgtggaactatagcaaactgccggaaacctttggcgcgacggaagatcgcgtagttagcaagatcgttcgcacagagaacgagtttgtgagtgtcatgaaagaagcgcaggccgatgttaaccgcatgtattggattgaactggttctggagaaagaagatgcaccgaaactgctgaagaagatggggaagctgtttgcagaacagaacaaa

SEQ ID NO: 496 - protein, 547 aa, Artificial Sequence
  Variant of branched-chain keto acid decarboxylase (kdcA) from Lactococcus lactis
MYTVGDYLLDRLHELGIEEIFGVPGDYNLQFLDQIIAREDMKWIGNANELNASYMADGYARTKKAAAFLTTFGVGELSAINGLAGSYAENLPVVEIVGSPTSKVQNDGKFVHHTLADGDFKHFWKMHEPVTAARTLLTAENATTEIDRVLSQLLKERKPVYINLPVDVAAAKAEKPALSLEKESSTLNTTEQVILSKIEESLKNAQKPVVIAGHEVISFGLEKTVTQFVSETKLPITTLNFGKSAVDESLPSFLGIYNGKLSEISLKNFVESADFILMLGVKLTDISTGAFTHHLDENKMISLNIDEGIIFNKVVEDFDFRAVVSSLLELKGIEYEGQYIDKQYEEFIPSSYPLSQDRLWQAVESLTQSNETIVAEQGTSFFGASTIPLKSNSRFIGQPLWGSIGYTFPAALGSQIADKESRHLLFIGDGSLQLTVQELGLAIREKLNPICFIINNDGYTVEREIHGPTQSYNDIPMWNYSKLPETFGATEDRVVSKIVRTENEFVSVMKEAQADVNRMYWIELVLEKEDAPKLLKKMGKLFAEQNK

SEQ ID NO: 497 - DNA, 1641 bp, Artificial Sequence
  Variant of branched-chain keto acid decarboxylase (kdcA) from Lactococcus lactis
atgtacaccgttggcgactatctgctggaccgtctgcatgaactgggaattgaagaaatctttggcgtgccgggcgattacaatctgcaattcctggatcaaatcattgcgcgcgaagatatgaaatggattggtaacgcgaatgaactgaatgcgagctacatggctgatggctatgcacgtacgaagaaggcggcggcgttcctgacgaccttcggtgttggtgaactgagcgcaatcaatgggttggcgggcagctatgcagagaacctgccagtcgtggaaatcgttgggagtccgacctcgaaggtgcagaacgatggcaagttcgttcatcacaccctggccgacggcgacttcaagcacttctggaagatgcacgaaccggtcaccgctgcacgtacactgctgaccgccgagaacgcgaccacagagattgaccgcgtgctgagccagctgctgaaagaacgtaaacctgtgtacatcaacctgccggttgatgtcgccgcggcgaaagccgagaaaccagctctgagcctggagaaagaaagcagcacgttaaacaccacagaacaggtgatcctgtcgaagatcgaagaaagcctgaagaacgcccagaaaccggtcgtgatcgctgggcacgaggtgattagcttcggtctggagaagacggttacgcagtttgtgagtgaaaccaaactgccgattactaccctgaactttggcaaatcggctgtggatgaatccctgccgtccttcctaggtatctacaatggtaaactgagcgagattagcctcaagaactttgtggaaagcgcagacttcatcctgatgcttggtgtgaaactgacggatatcagtacgggcgcgtttacgcaccatctggacgagaacaagatgattagcctgaacattgatgaaggcatcatcttcaacaaagtcgtagaagacttcgatttccgcgcggttgttagcagcctgtcagagctgaaaggcattgaatacgaaggtcaatacattgataagcagtacgaagagttcgacccgagcagcaacccactgagccaagaccgtctgtggcaagcagtagaatctctgacacagtccaatgaaaccattgtggcggaacagggcacgtcgttcttcggtgcctccaccatcttcctgaagagcaattcacgcttcatcggtcagccgctttggggcagcatcggctatacgtttccggcagcactgggatcacagattgcggataaggaaagtcgccatctgctgttcattggtgatggtagcctgcaactgaccgtgcaggagctgggcctggcgatccgtgagaaactgaacccgatttgtttcatcatcaacaacgatggctataccgtagagcgcgagattcatgggcctacacagagctacaatgacatcccgatgtggaactatagcaaactgccggaaacctttggcgcgacggaagatcgcgtagttagcaagatcgttcgcacagagaacgagtttgtgagtgtcatgaaagaagcgcaggccgatgttaaccgcatgtattggattgaactggttctggagaaagaagatgcaccgaaactgctgaagaagatggggaagctgtttgcagaacagaacaaa

SEQ ID NO: 498 - protein, 547 aa, Artificial Sequence
  Variant of branched-chain keto acid decarboxylase (kdcA) from Lactococcus lactis
MYTVGDYLLDRLHELGIEEIFGVPGDYNLQFLDQIIAREDMKWIGNANELNASYMADGYARTKKAAAFLTTFGVGELSAINGLAGSYAENLPVVEIVGSPTSKVQNDGKFVHHTLADGDFKHFWKMHEPVTAARTLLTAENATTEIDRVLSQLLKERKPVYINLPVDVAAAKAEKPALSLEKESSTLNTTEQVILSKIEESLKNAQKPVVIAGHEVISFGLEKTVTQFVSETKLPITTLNFGKSAVDESLPSFLGIYNGKLSEISLKNFVESADFILMLGVKLTDISTGAFTHHLDENKMISLNIDEGIIFNKVVEDFDFRAVVSSLSELKGIEYEGQYIDKQYEEFDPSSNPLSQDRLWQAVESLTQSNETIVAEQGTSFFGASTIFLKSNSRFIGQPLWGSIGYTFPAALGSQIADKESRHLLFIGDGSLQLTVQELGLAIREKLNPICFIINNDGYTVEREIHGPTQSYNDIPMWNYSKLPETFGATEDRVVSKIVRTENEFVSVMKEAQADVNRMYWIELVLEKEDAPKLLKKMGKLFAEQNK

SEQ ID NO: 499 - DNA, 1641 bp, Artificial Sequence
  Variant of branched-chain keto acid decarboxylase (kdcA) from Lactococcus lactis
atgtacaccgttggcgactatctgctggaccgtctgcatgaactgggaattgaagaaatctttggcgtgccgggcgattacaatctgcaattcctggatcaaatcattgcgcgcgaagatatgaaatggattggtaacgcgaatgaactgaatgcgagctacatggctgatggctatgcacgtacgaagaaggcggcggcgttcctgacgaccttcggtgttggtgaactgagcgcaatcaatgggttggcgggcagctatgcagagaacctgccagtcgtggaaatcgttgggagtccgacctcgaaggtgcagaacgatggcaagttcgttcatcacaccctggccgacggcgacttcaagcacttcatgaagatgcacgaaccggtcaccgctgcacgtacactgctgaccgccgagaacgcgaccacagagattgaccgcgtgctgagccggctgctgaaagaacgtaaacctgtgtacatcaacctgccggttgatgtcgccgcggcgaaagccgagaaaccagctctgagcctggagaaagaaagcagcacgttaaacaccacagaacaggtgatcctgtcgaagatcgaagaaagcctgaagaacgcccagaaaccggtcgtgatcgctgggcacgaggtgattagcttcggtctggagaagacggttacgcagtttgtgagtgaaaccaaactgccgattactaccctgaactttggcaaatcggctgtggatgaatccctgccgtccttcctgggtatctacaatggtaaactgagcgagattagcctcaagaactttgtggaaagcgcagacttcatcctgatgcttggtgtgaaactgacggatatcagtacgggcgcgtttacgcaccatctggacgagaacaagatgattagcctgaacattgatgaaggcatcatcttcaacaaagtcgtagaagacttcgatttccgcgcggttgttagcagcctgaatgagctgaaaggcattgaatacgaaggtcaatacattgataagcagtacgaagagttcattccgagcagcgcaccactgagccaagaccgtctgtggcaagcagtagaatctctgacacagtccaatgaaaccattgtggcggaacagggcacgtcgttcttcggtgcctccaccatccccctgaagagcaattcacgcttcatcggtcagccgctttggggcagcatcggctatacgtttccggcagcactgggatcacagattgcggataaggaaagtcgccatctgctgttcattggtgatggtagcctgcaactgaccgtgcaggagctgggcctggcgatccgtgagagactgaacccgatttgtttcatcatcaacaacgatggctataccgtagagcgcgagattcatgggcctacacagagctacaatgacatcccgatgtggaactatagcaaactgccggaaacctttggcgcgacggaagatcgcgtagttagcaagatcgttcgcacagagaacgagtttgtgagtgtcatgaaagaagcgcaggccgatgttaaccgcatgtattggattgaactggttctggagaaagaagatgcaccgaaactgctgaagaagatggggaagctgtttgcagaacagaacaaa

SEQ ID NO: 500 - protein, 547 aa, Artificial Sequence
  Variant of branched-chain keto acid decarboxylase (kdcA) from Lactococcus lactis
MYTVGDYLLDRLHELGIEEIFGVPGDYNLQFLDQIIAREDMKWIGNANELNASYMADGYARTKKAAAFLTTFGVGELSAINGLAGSYAENLPVVEIVGSPTSKVQNDGKFVHHTLADGDFKHFMKMHEPVTAARTLLTAENATTEIDRVLSRLLKERKPVYINLPVDVAAAKAEKPALSLEKESSTLNTTEQVILSKIEESLKNAQKPVVIAGHEVISFGLEKTVTQFVSETKLPITTLNFGKSAVDESLPSFLGIYNGKLSEISLKNFVESADFILMLGVKLTDISTGAFTHHLDENKMISLNIDEGIIFNKVVEDFDFRAVVSSLNELKGIEYEGQYIDKQYEEFIPSSAPLSQDRLWQAVESLTQSNETIVAEQGTSFFGASTIPLKSNSRFIGQPLWGSIGYTFPAALGSQIADKESRHLLFIGDGSLQLTVQELGLAIRERLNPICFIINNDGYTVEREIHGPTQSYNDIPMWNYSKLPETFGATEDRVVSKIVRTENEFVSVMKEAQADVNRMYWIELVLEKEDAPKLLKKMGKLFAEQNK

SEQ ID NO: 501 - DNA, 1641 bp, Artificial Sequence
  Variant of branched-chain keto acid decarboxylase (kdcA) from Lactococcus lactis
atgtacaccgttggcgactatctgctggaccgtctgcatgaactgggaattgaagaaatctttggcgtgccgggcgattacaatctgcaattcctggatcaaatcattgcgcgcgaagatatgaaatggattggtaacgcgaatgaactgaatgcgagctacatggctgatggctatgcacgtacgaagaaggcggcggcgttcctgacgaccttcggtgttggtgaactgagcgcaatcaatgggttggcgggcagctatgcagagaacctgccagtcgtggaaatcgttgggagtccgacctcgaaggtgcagaacgatggcaagttcgttcatcacaccctggccgacggcgacttcaagcacttctggaagatgcacgaaccggtcaccgctgcacgtacactgctgaccgccgagaacgcgaccacagagattgaccgcgtgctgagccggctgctgaaagaacgtaaacctgtgtacatcaacctgccggttgatgtcgccgcggcgaaagccgagaaaccagctctgagcctggagaaagaaagcagcacgttaaacaccacagaacaggtgatcctgtcgaagatcgaagaaagcctgaagaacgcccagaaaccggtcgtgatcgctgggcacgaggtgattagcttcggtctggagaagacggttacgcagtttgtgagtgaaaccaaactgccgattactaccctgaactttggcaaatcggctgtggatgaatccctgccgtccttcctgggtatctacaatggtaaactgagcgagattagcctcaagaactttgtggaaagcgcagacttcatcctgatgcttggtgtgaaactgacggatatcagtacgggcgcgtttacgcaccatctggacgagaacaagatgattagcctgaacattgatgaaggcatcatcttcaacaaagtcgtagaagacttcgatttccgtgcggttgttagcagcctgagcgagctgaaaggcattgaatacgaaggtcaatacattgataagcagtacgaagagttcattccgagcagcgcaccactgagccaagaccgtctgtggcaagcagtagaatctctgacacagtccaatgaaaccattgtggcggaacagggcacgtcgttcttcggtgcctccaccatccccctgaagagcaattcacgcttcatcggtcagccgctttggggcagcatcggctatacgtttccggcagcactgggatcacagattgcggataaggaaagtcgccatctgctgttcattggtgatggtagcctgcaactgaccgtgcaggagctgggcctggcgatccgtgagagactgaacccgatttgtttcatcatcaacaacgatggctataccgtagagcgcgagattcatgggcctacacagagctacaatgacatcccgatgtggaactatagcaaactgccggaaacctttggcgcgacggaagatcgcgtagttagcaagatcgttcgcacagagaacgagtttgtgagtgtcatgaaagaagcgcaggccgatgttaaccgcatgtattggattgaactggttctggagaaagaagatgcaccgaaactgctgaagaagatggggaagctgtttgcagaacagaacaaa

SEQ ID NO: 502 - protein, 547 aa, Artificial Sequence
  Variant of branched-chain keto acid decarboxylase (kdcA) from Lactococcus lactis
MYTVGDYLLDRLHELGIEEIFGVPGDYNLQFLDQIIAREDMKWIGNANELNASYMADGYARTKKAAAFLTTFGVGELSAINGLAGSYAENLPVVEIVGSPTSKVQNDGKFVHHTLADGDFKHFWKMHEPVTAARTLLTAENATTEIDRVLSRLLKERKPVYINLPVDVAAAKAEKPALSLEKESSTLNTTEQVILSKIEESLKNAQKPVVIAGHEVISFGLEKTVTQFVSETKLPITTLNFGKSAVDESLPSFLGIYNGKLSEISLKNFVESADFILMLGVKLTDISTGAFTHHLDENKMISLNIDEGIIFNKVVEDFDFRAVVSSLSELKGIEYEGQYIDKQYEEFIPSSAPLSQDRLWQAVESLTQSNETIVAEQGTSFFGASTIPLKSNSRFIGQPLWGSIGYTFPAALGSQIADKESRHLLFIGDGSLQLTVQELGLAIRERLNPICFIINNDGYTVEREIHGPTQSYNDIPMWNYSKLPETFGATEDRVVSKIVRTENEFVSVMKEAQADVNRMYWIELVLEKEDAPKLLKKMGKLFAEQNK

SEQ ID NO: 503 - DNA, 1641 bp, Artificial Sequence
  Variant of branched-chain keto acid decarboxylase (kdcA) from Lactococcus lactis
atgtacaccgttggcgactatctgctggaccgtctgcatgaactgggaattgaagaaatctttggcgtgccgggcgattacaatctgcaattcctggatcaaatcattgcgcgcgaagatatgaaatggattggtaacgcgaatgaactgaatgcgagctacatggctgatggctatgcacgtacgaagaaggcggcggcgttcctgacgaccttcggtgttggtgaactgagcgcaatcaatgggttggcgggcagctatgcagagaacctgccagtcgtggaaatcgttgggagtccgacctcgaaggtgcagaacgatggcaagttcgttcatcacaccctggccgacggcgacttcaagcacttctggaagatgcacgaaccggtcaccgctgcacgtacactgctgaccgccgagaacgcgaccacagagattgaccgcgtgctgagccggctgctgaaagaacgtaaacctgtgtacatcaacctgccggttgatgtcgccgcggcgaaagccgagaaaccagctctgagcctggagaaagaaagcagcacgttaaacaccacagaacaggtgatcctgtcgaagatcgaagaaagcctgaagaacgcccagaaaccggtcgtgatcgctgggcacgaggtgattagcttcggtctggagaagacggttacgcagtttgtgagtgaaaccaaactgccgattactaccctgaactttggcaaatcggctgtggatgaatccctgccgtccttcctaggtatctacaatggtaaactgagcgagattagcctcaagaactttgtggaaagcgcagacttcatcctgatgcttggtgtgaaactgacggatatcagtacgggcgcgtttacgcaccatctggacgagaacaagatgattagcctgaacattgatgaaggcatcatcttcaacaaagtcgtagaagacttcgatttccgcgcggttgttagcagcctgagcgagctgaaaggcattgaatacgaaggtcaatacattgataagcagtacgaagagttcattccgagcagcgcaccactgagccaagaccgtctgtggcaagcagtagaatctctgacacagtccaatgaaaccattgtggcggaacagggcacgtcgttcttcggtgcctccaccatccccctgaagagcaattcacgcttcatcggtcagccgctttggggcagcatcggctatacgtttccggcagcactgggatcacagattgcggataaggaaagtcgccatctgctgttcattggtgatggtagcctgcaactgaccgtgcaggagctgggcctggcgatccgtgagaaactgaacccgatttgtttcatcatcaacaacgatggctataccgtagagcgcgagattcatgggcctacacagagctacaatgacatcccgatgtggaactatagcaaactgccggaaacctttggcgcgacggaagatcgcgtagttagcaagatcgttcgcacagagaacgagtttgtgagtgtcatgaaagaagcgcaggccgatgttaaccgcatgtattggattgaactggttctggagaaagaagatgcaccgaaactgctgaagaagatggggaagctgtttgcagaacagaacaaa

SEQ ID NO: 504 - protein, 547 aa, Artificial Sequence
  Variant of branched-chain keto acid decarboxylase (kdcA) from Lactococcus lactis
MYTVGDYLLDRLHELGIEEIFGVPGDYNLQFLDQIIAREDMKWIGNANELNASYMADGYARTKKAAAFLTTFGVGELSAINGLAGSYAENLPVVEIVGSPTSKVQNDGKFVHHTLADGDFKHFWKMHEPVTAARTLLTAENATTEIDRVLSRLLKERKPVYINLPVDVAAAKAEKPALSLEKESSTLNTTEQVILSKIEESLKNAQKPVVIAGHEVISFGLEKTVTQFVSETKLPITTLNFGKSAVDESLPSFLGIYNGKLSEISLKNFVESADFILMLGVKLTDISTGAFTHHLDENKMISLNIDEGIIFNKVVEDFDFRAVVSSLSELKGIEYEGQYIDKQYEEFIPSSAPLSQDRLWQAVESLTQSNETIVAEQGTSFFGASTIPLKSNSRFIGQPLWGSIGYTFPAALGSQIADKESRHLLFIGDGSLQLTVQELGLAIREKLNPICFIINNDGYTVEREIHGPTQSYNDIPMWNYSKLPETFGATEDRVVSKIVRTENEFVSVMKEAQADVNRMYWIELVLEKEDAPKLLKKMGKLFAEQNK

SEQ ID NO: 505 - DNA, 1641 bp, Artificial Sequence
  Variant of branched-chain keto acid decarboxylase (kdcA) from Lactococcus lactis
atgtacaccgttggcgactatctgctggaccgtctgcatgaactgggaattgaagaaatctttggcgtgccgggcgattacaatctgcaattcctggatcaaatcattgcgcatgaagatatgaaatggattggtaacgcgaatgaactgaatgcgagctacatggctgatggctatgcacgtacgaagaaggcggcggcgttcctgacgaccttcggtgttggtgaactgagcgcaatcaatgggttggcgggcagctatgcagagaacctgccagtcgtggaaatcgttgggagtccgacctcgaaggtgcagaacgatggcaagttcgttcatcacaccctggccgacggcgacttcaagcacttcatgaagatgcacgaaccggtcaccgctgcacgtacactgctgaccgccgagaacgcgaccacagagattgaccgcgtgctgagccaactgctgaaagaacgtaaacctgtgtacatcaacctgccggttgatgtcgccgcggcgaaagccgagaaaccagctctgagcctggagaaagaaagcagcacgttaaacaccacagaacaggtgatcctgtcgaagatcgaagaaagcctgaagaacgcccagaaaccggtcgtgatcgctgggcacgaggtgattagcttcggtctggagaagacggttacgcagtttgcgagtgaaaccaaactgccgattactaccctgaactttggcaaatcggctgtggatgaatccctgccgtcccatttgggtgtttacaatggtaaactgagcgagattagcctcaagaactttgtggaaagcgcagacttcatcctgatgcttggtgtgaaactgacggatatcagtacgggcgcgtttacgcaccatctggacgagaacaagatgattagcctgaacattgatgaaggcatcatcttcaacaaagtcgtagaagacttcgatttccgggcggttgtttctagcctgagcgagctgaaaggcattgaatacgaaggtcaatacattgataagcagtacgaagagttcattccgagcagcgcaccactggagcaagaccgtctgtggcaagcagtagaatctctgacacagtccaatgaaaccattgtggcggaacagggcacgtcgttcttcggtgcctccaccatcttcctgaagagcaattcacgcttcatcggtcagccgctttggggcagcatcggctatacgtttccggcagcactgggatcacagattgcggataaggaaagtcgccatctgctgttcattggtgatggtagcctgcaactgaccgtgcaggagctgggcctggcgatccgtgagaaactgaacccgatttgtttcatcatcaacaacgatggctataccgtagagcgcgagattcatgggcctacacagagctacaatgacatcccgatgtggaactatagcaaactgccggaaacctttggcgcgacggaagatcgcgtagttagcaagatcgttcgcacagagaacgagtttgtgagtgtcatgaaagaagcgcaggccgatgttaaccgcatgtattggattgaactggttctggagaaagaagatgcaccgaaactgctgaagaagatggggaagctgtttgcagaacagaacaaa

SEQ ID NO: 506 - protein, 547 aa, Artificial Sequence
  Variant of branched-chain keto acid decarboxylase (kdcA) from Lactococcus lactis
MYTVGDYLLDRLHELGIEEIFGVPGDYNLQFLDQIIAHEDMKWIGNANELNASYMADGYARTKKAAAFLTTFGVGELSAINGLAGSYAENLPVVEIVGSPTSKVQNDGKFVHHTLADGDFKHFMKMHEPVTAARTLLTAENATTEIDRVLSQLLKERKPVYINLPVDVAAAKAEKPALSLEKESSTLNTTEQVILSKIEESLKNAQKPVVIAGHEVISFGLEKTVTQFASETKLPITTLNFGKSAVDESLPSHLGVYNGKLSEISLKNFVESADFILMLGVKLTDISTGAFTHHLDENKMISLNIDEGIIFNKVVEDFDFRAVVSSLSELKGIEYEGQYIDKQYEEFIPSSAPLEQDRLWQAVESLTQSNETIVAEQGTSFFGASTIFLKSNSRFIGQPLWGSIGYTFPAALGSQIADKESRHLLFIGDGSLQLTVQELGLAIREKLNPICFIINNDGYTVEREIHGPTQSYNDIPMWNYSKLPETFGATEDRVVSKIVRTENEFVSVMKEAQADVNRMYWIELVLEKEDAPKLLKKMGKLFAEQNK

SEQ ID NO: 507 - DNA, 1641 bp, Artificial Sequence
  Variant of branched-chain keto acid decarboxylase (kdcA) from Lactococcus lactis
atgtacaccgttggcgactatctgctggaccgtctgcatgaactgggaattgaagaaatctttggcgtgccgggcgattacaatctgcaattcctggatcaaatcattgcgagggaagatatgaaatggattggtaacgcgaatgaactgaatgcgagctacatggctgatggctatgcacgtacgaagaaggcggcggcgttcctgacgaccttcggtgttggtgaactgagcgcaatcaatgggttggcgggcagctatgcagagaacctgccagtcgtggaaatcgttgggagtccgacctcgaaggtgcagaacgatggcaagttcgttcatcacaccctggccgacggcgacttcaagcacttcaagaagatgcacgaaccggtcaccgctgcacgtacactgctgaccgccgagaacgcgaccacagagattgaccgcgtgctgagccaactgctgaaagaacgtaaacctgtgtacatcaacctgccggttgatgtcgccgcggcgaaagccgagaaaccagctctgagcctggagaaagaaagcagcacgttaaacaccacagaacaggtgatcctgtcgaagatcgaagaaagcctgaagaacgcccagaaaccggtcgtgatcgctgggcacgaggtgattagcttcggtctggagaagacggttacgcagtttgtgagtgaaaccaaactgccgattactaccctgaactttggcaaatcggctgtggatgaatccctgccgtccttcctgggtatctacaatggtaaactgagcgagattagcctcaagaactttgtggaaagcgcagacttcatcctgatgcttggtgtgaaactgacggatatcagtacgggcgcgtttacgcaccatctggacgagaacaagatgattagcctgaacattgatgaaggcatcatcttcaacaaagtcgtagaagacttcgatttcgaagcggttgtttttagcctgagcgagctgaaaggcattgaatacgaaggtcaatacattgataagcagtacgaagagttcattccgagcagcgcaccactgttgcaagaccgtctgtggcaagcagtagaatctctgacacagtccaatgaaaccattgtggcggaacagggcacgtcgttcttcggtgcctccaccatcttcctgaagagcaattcacgcttcatcggtcagccgctttggggcagcatcggctatacgtttccggcagcactgggatcacagattgcggataaggaaagtcgccatctgctgttcattggtgatggtagcctgcaactgaccgtgcaggagctgggcctggcgatccgtgagaaactgaacccgatttgtttcatcatcaacaacgatggctataccgtagagcgcgagattcatgggcctacacagagctacaatgacatcccgatgtggaactatagcaaactgccggaaacctttggcgcgacggaagatcgcgtagttagcaagatcgttcgcacagagaacgagtttgtgagtgtcatgaaagaagcgcaggccgatgttaaccgcatgtattggattgaactggttctggagaaagaagatgcaccgaaactgctgaagaagatggggaagctgtttgcagaacagaacaaa

SEQ ID NO: 508 - protein, 547 aa, Artificial Sequence
  Variant of branched-chain keto acid decarboxylase (kdcA) from Lactococcus lactis
MYTVGDYLLDRLHELGIEEIFGVPGDYNLQFLDQIIAREDMKWIGNANELNASYMADGYARTKKAAAFLTTFGVGELSAINGLAGSYAENLPVVEIVGSPTSKVQNDGKFVHHTLADGDFKHFKKMHEPVTAARTLLTAENATTEIDRVLSQLLKERKPVYINLPVDVAAAKAEKPALSLEKESSTLNTTEQVILSKIEESLKNAQKPVVIAGHEVISFGLEKTVTQFVSETKLPITTLNFGKSAVDESLPSFLGIYNGKLSEISLKNFVESADFILMLGVKLTDISTGAFTHHLDENKMISLNIDEGIIFNKVVEDFDFEAVVFSLSELKGIEYEGQYIDKQYEEFIPSSAPLLQDRLWQAVESLTQSNETIVAEQGTSFFGASTIFLKSNSRFIGQPLWGSIGYTFPAALGSQIADKESRHLLFIGDGSLQLTVQELGLAIREKLNPICFIINNDGYTVEREIHGPTQSYNDIPMWNYSKLPETFGATEDRVVSKIVRTENEFVSVMKEAQADVNRMYWIELVLEKEDAPKLLKKMGKLFAEQNK

SEQ ID NO: 509 - DNA, 1641 bp, Artificial Sequence
  Variant of branched-chain keto acid decarboxylase (kdcA) from Lactococcus lactis
atgtacaccgttggcgactatctgctggaccgtctgcatgaactgggaattgaagaaatctttggcgtgccgggcgattacaatctgcaattcctggatcaaatcattgcgcgcgaagatatgaaatggattggtaacgcgaatgaactgaatgcgagctacatggctgatggctatgcacgtacgaagaaggcggcggcgttcctgacgaccttcggtgttggtgaactgagcgcaatcaatgggttggcgggcagctatgcagagaacctgccagtcgtggaaatcgttgggagtccgacctcgaaggtgcagaacgatggcaagttcgttcatcacaccctggccgacggcgacttcaagcacttcaagaagatgcacgaaccggtcaccgctgcacgtacactgctgaccgccgagaacgcgaccacagagattgaccgcgtgctgagccaactgctgaaagaacgtaaacctgtgtacatcaacctgccggttgatgtcgccgcggcgaaagccgagaaaccagctctgagcctggagaaagaaagcagcacgttaaacaccacagaacaggtgatcctgtcgaagatcgaagaaagcctgaagaacgcccagaaaccggtcgtgatcgctgggcacgaggtgattagcttcggtctggagaagacggttacgcagtttgcgagtgaaaccaaactgccgattactaccctgaactttggcaaatcggctgtggatgaatccctgccgtcctttttgggtgtttacaatggtaaactgagcgagattagcctcaagaactttgtggaaagcgcagacttcatcctgatgcttggtgtgaaactgacggatatcagtacgggcgcgtttacgcaccatctggacgagaacaagatgattagcctgaacattgatgaaggcatcatcttcaacaaagtcgtagaagacttcgatttcgaagcggttgtttttagcctgagcgagctgaaaggcattgaatacgaaggtcaatacattgataagcagtacgaagagttcattccgagcagcgcaccactggagcaagaccgtctgtggcaagcagtagaatctctgacacagtccaatgaaaccattgtggcggaacagggcacgtcgttcttcggtgcctccaccatcttcctgaagagcaattcacgcttcatcggtcagccgctttggggcagcatcggctatacgtttccggcagcactgggatcacagattgcggataaggaaagtcgccatctgctgttcattggtgatggtagcctgcaactgaccgtgcaggagctgggcctggcgatccgtgagaaactgaacccgatttgtttcatcatcaacaacgatggctataccgtagagcgcgagattcatgggcctacacagagctacaatgacatcccgatgtggaactatagcaaactgccggaaacctttggcgcgacggaagatcgcgtagttagcaagatcgttcgcacagagaacgagtttgtgagtgtcatgaaagaagcgcaggccgatgttaaccgcatgtattggattgaactggttctggagaaagaagatgcaccgaaactgctgaagaagatggggaagctgtttgcagaacagaacaaa

SEQ ID NO: 510 - protein, 547 aa, Artificial Sequence
  Variant of branched-chain keto acid decarboxylase (kdcA) from Lactococcus lactis
MYTVGDYLLDRLHELGIEEIFGVPGDYNLQFLDQIIAREDMKWIGNANELNASYMADGYARTKKAAAFLTTFGVGELSAINGLAGSYAENLPVVEIVGSPTSKVQNDGKFVHHTLADGDFKHFKKMHEPVTAARTLLTAENATTEIDRVLSQLLKERKPVYINLPVDVAAAKAEKPALSLEKESSTLNTTEQVILSKIEESLKNAQKPVVIAGHEVISFGLEKTVTQFASETKLPITTLNFGKSAVDESLPSFLGVYNGKLSEISLKNFVESADFILMLGVKLTDISTGAFTHHLDENKMISLNIDEGIIFNKVVEDFDFEAVVFSLSELKGIEYEGQYIDKQYEEFIPSSAPLEQDRLWQAVESLTQSNETIVAEQGTSFFGASTIFLKSNSRFIGQPLWGSIGYTFPAALGSQIADKESRHLLFIGDGSLQLTVQELGLAIREKLNPICFIINNDGYTVEREIHGPTQSYNDIPMWNYSKLPETFGATEDRVVSKIVRTENEFVSVMKEAQADVNRMYWIELVLEKEDAPKLLKKMGKLFAEQNK

SEQ ID NO: 511 - DNA, 1641 bp, Artificial Sequence
  Variant of branched-chain keto acid decarboxylase (kdcA) from Lactococcus lactis
atgtacaccgttggcgactatctgctggaccgtctgcatgaactgggaattgaagaaatctttggcgtgccgggcgattacaatctgcaattcctggatcaaatcattgcgagggaagatatgaaatggattggtaacgcgaatgaactgaatgcgagctacatggctgatggctatgcacgtacgaagaaggcggcggcgttcctgacgaccttcggtgttggtgaactgagcgcaatcaatgggttggcgggcagctatgcagagaacctgccagtcgtggaaatcgttgggagtccgacctcgaaggtgcagaacgatggcaagttcgttcatcacaccctggccgacggcgacttcaagcacttcatgaagatgcacgaaccggtcaccgctgcacgtacactgctgaccgccgagaacgcgaccacagagattgaccgcgtgctgagccaactgctgaaagaacgtaaacctgtgtacatcaacctgccggttgatgtcgccgcggcgaaagccgagaaaccagctctgagcctggagaaagaaagcagcacgttaaacaccacagaacaggtgatcctgtcgaagatcgaagaaagcctgaagaacgcccagaaaccggtcgtgatcgctgggcacgaggtgattagcttcggtctggagaagacggttacgcagtttgtgagtgaaaccaaactgccgattactaccctgaactttggcaaatcggctgtggatgaatccctgccgtcctatgccggtatttacaatggtaaactgagcgagattagcctcaagaactttgtggaaagcgcagacttcatcctgatgcttggtgtgaaactgacggatatcagtacgggcgcgtttacgcaccatctggacgagaacaagatgattagcctgaacattgatgaaggcatcatcttcaacaaagtcgtagaagacttcgatttcgaagcggttgtttttagcctgagcgagctgaaaggcattgaatacgaaggtcaatacattgataagcagtacgaagagttcattccgagcagcgcaccactggagcaagaccgtctgtggcaagcagtagaatctctgacacagtccaatgaaaccattgtggcggaacagggcacgtcgttcttcggtgcctccaccatcttcctgaagagcaattcacgcttcatcggtcagccgctttggggcagcatcggctatacgtttccggcagcactgggatcacagattgcggataaggaaagtcgccatctgctgttcattggtgatggtagcctgcaactgaccgtgcaggagctgggcctggcgatccgtgagaaactgaacccgatttgtttcatcatcaacaacgatggctataccgtagagcgcgagattcatgggcctacacagagctacaatgacatcccgatgtggaactatagcaaactgccggaaacctttggcgcgacggaagatcgcgtagttagcaagatcgttcgcacagagaacgagtttgtgagtgtcatgaaagaagcgcaggccgatgttaaccgcatgtattggattgaactggttctggagaaagaagatgcaccgaaactgctgaagaagatggggaagctgtttgcagaacagaacaaa

SEQ ID NO: 512 - protein, 547 aa, Artificial Sequence
  Variant of branched-chain keto acid decarboxylase (kdcA) from Lactococcus lactis
MYTVGDYLLDRLHELGIEEIFGVPGDYNLQFLDQIIAREDMKWIGNANELNASYMADGYARTKKAAAFLTTFGVGELSAINGLAGSYAENLPVVEIVGSPTSKVQNDGKFVHHTLADGDFKHFMKMHEPVTAARTLLTAENATTEIDRVLSQLLKERKPVYINLPVDVAAAKAEKPALSLEKESSTLNTTEQVILSKIEESLKNAQKPVVIAGHEVISFGLEKTVTQFVSETKLPITTLNFGKSAVDESLPSYAGIYNGKLSEISLKNFVESADFILMLGVKLTDISTGAFTHHLDENKMISLNIDEGIIFNKVVEDFDFEAVVFSLSELKGIEYEGQYIDKQYEEFIPSSAPLEQDRLWQAVESLTQSNETIVAEQGTSFFGASTIFLKSNSRFIGQPLWGSIGYTFPAALGSQIADKESRHLLFIGDGSLQLTVQELGLAIREKLNPICFIINNDGYTVEREIHGPTQSYNDIPMWNYSKLPETFGATEDRVVSKIVRTENEFVSVMKEAQADVNRMYWIELVLEKEDAPKLLKKMGKLFAEQNK

SEQ ID NO: 513 - DNA, 1641 bp, Artificial Sequence
  Variant of branched-chain keto acid decarboxylase (kdcA) from Lactococcus lactis
atgtacaccgttggcgactatctgctggaccgtctgcatgaactgggaattgaagaaatctttggcgtgccgggcgattacaatctgcaattcctggatcaaatcattgcgcatgaagatatgaaatggattggtaacgcgaatgaactgaatgcgagctacatggctgatggctatgcacgtacgaagaaggcggcggcgttcctgacgaccttcggtgttggtgaactgagcgcaatcaatgggttggcgggcagctatgcagagaacctgccagtcgtggaaatcgttgggagtccgacctcgaaggtgcagaacgatggcaagttcgttcatcacaccctggccgacggcgacttcaagcacttcatgaagatgcacgaaccggtcaccgctgcacgtacactgctgaccgccgagaacgcgaccacagagattgaccgcgtgctgagccaactgctgaaagaacgtaaacctgtgtacatcaacctgccggttgatgtcgccgcggcgaaagccgagaaaccagctctgagcctggagaaagaaagcagcacgttaaacaccacagaacaggtgatcctgtcgaagatcgaagaaagcctgaagaacgcccagaaaccggtcgtgatcgctgggcacgaggtgattagcttcggtctggagaagacggttacgcagtttgtgagtgaaaccaaactgccgattactaccctgaactttggcaaatcggctgtggatgaatccctgccgtccttcctgggtatctacaatggtaaactgagcgagattagcctcaagaactttgtggaaagcgcagacttcatcctgatgcttggtgtgaaactgacggatatcagtacgggcgcgtttacgcaccatctggacgagaacaagatgattagcctgaacattgatgaaggcatcatcttcaacaaagtcgtagaagacttcgatttccgtgcggttgttagcagcctgagcgagctgaaaggcattgaatacgaaggtcaatacattgataagcagtacgaagagttcattccgagcagcgcaccactggagcaagaccgtctgtggcaagcagtagaatctctgacacagtccaatgaaaccattgtggcggaacagggcacgtcgttcttcggtgcctccaccatcttcctgaagagcaattcacgcttcatcggtcagccgctttggggcagcatcggctatacgtttccggcagcactgggatcacagattgcggataaggaaagtcgccatctgctgttcattggtgatggtagcctgcaactgaccgtgcaggagctgggcctggcgatccgtgagaaactgaacccgatttgtttcatcatcaacaacgatggctataccgtagagcgcgagattcatgggcctacacagagctacaatgacatcccgatgtggaactatagcaaactgccggaaacctttggcgcgacggaagatcgcgtagttagcaagatcgttcgcacagagaacgagtttgtgagtgtcatgaaagaagcgcaggccgatgttaaccgcatgtattggattgaactggttctggagaaagaagatgcaccgaaactgctgaagaagatggggaagctgtttgcagaacagaacaaa

SEQ ID NO: 514 - protein, 547 aa, Artificial Sequence
  Variant of branched-chain keto acid decarboxylase (kdcA) from Lactococcus lactis
MYTVGDYLLDRLHELGIEEIFGVPGDYNLQFLDQIIAHEDMKWIGNANELNASYMADGYARTKKAAAFLTTFGVGELSAINGLAGSYAENLPVVEIVGSPTSKVQNDGKFVHHTLADGDFKHFMKMHEPVTAARTLLTAENATTEIDRVLSQLLKERKPVYINLPVDVAAAKAEKPALSLEKESSTLNTTEQVILSKIEESLKNAQKPVVIAGHEVISFGLEKTVTQFVSETKLPITTLNFGKSAVDESLPSFLGIYNGKLSEISLKNFVESADFILMLGVKLTDISTGAFTHHLDENKMISLNIDEGIIFNKVVEDFDFRAVVSSLSELKGIEYEGQYIDKQYEEFIPSSAPLEQDRLWQAVESLTQSNETIVAEQGTSFFGASTIFLKSNSRFIGQPLWGSIGYTFPAALGSQIADKESRHLLFIGDGSLQLTVQELGLAIREKLNPICFIINNDGYTVEREIHGPTQSYNDIPMWNYSKLPETFGATEDRVVSKIVRTENEFVSVMKEAQADVNRMYWIELVLEKEDAPKLLKKMGKLFAEQNK

SEQ ID NO: 515 - DNA, 1641 bp, Artificial Sequence
  Variant of branched-chain keto acid decarboxylase (kdcA) from Lactococcus lactis
atgtacaccgttggcgactatctgctggaccgtctgcatgaactgggaattgaagaaatctttggcgtgccgggcgattacaatctgcaattcctggatcaaatcattgcgcatgaagatatgaaatggattggtaacgcgaatgaactgaatgcgagctacatggctgatggctatgcacgtacgaagaaggcggcggcgttcctgacgaccttcggtgttggtgaactgagcgcaatcaatgggttggcgggcagctatgcagagaacctgccagtcgtggaaatcgttgggagtccgacctcgaaggtgcagaacgatggcaagttcgttcatcacaccctggccgacggcgacttcaagcacttcatgaagatgcacgaaccggtcaccgctgcacgtacactgctgaccgccgagaacgcgaccacagagattgaccgcgtgctgagccaactgctgaaagaacgtaaacctgtgtacatcaacctgccggttgatgtcgccgcggcgaaagccgagaaaccagctctgagcctggagaaagaaagcagcacgttaaacaccacagaacaggtgatcctgtcgaagatcgaagaaagcctgaagaacgcccagaaaccggtcgtgatcgctgggcacgaggtgattagcttcggtctggagaagacggttacgcagtttgtgagtgaaaccaaactgccgattactaccctgaactttggcaaatcggctgtggatgaatccctgccgtccttcctgggtatctacaatggtaaactgagcgagattagcctcaagaactttgtggaaagcgcagacttcatcctgatgcttggtgtgaaactgacggatatcagtacgggcgcgtttacgcaccatctggacgagaacaagatgattagcctgaacattgatgaaggcatcatcttcaacaaagtcgtagaagacttcgatttccgggcggttgtttttagcctgagcgagctgaaaggcattgaatacgaaggtcaatacattgataagcagtacgaagagttcattccgagcagcgcaccactgttgcaagaccgtctgtggcaagcagtagaatctctgacacagtccaatgaaaccattgtggcggaacagggcacgtcgttcttcggtgcctccaccatcttcctgaagagcaattcacgcttcatcggtcagccgctttggggcagcatcggctatacgtttccggcagcactgggatcacagattgcggataaggaaagtcgccatctgctgttcattggtgatggtagcctgcaactgaccgtgcaggagctgggcctggcgatccgtgagaaactgaacccgatttgtttcatcatcaacaacgatggctataccgtagagcgcgagattcatgggcctacacagagctacaatgacatcccgatgtggaactatagcaaactgccggaaacctttggcgcgacggaagatcgcgtagttagcaagatcgttcgcacagagaacgagtttgtgagtgtcatgaaagaagcgcaggccgatgttaaccgcatgtattggattgaactggttctggagaaagaagatgcaccgaaactgctgaagaagatggggaagctgtttgcagaacagaacaaa

SEQ ID NO: 516 - protein, 547 aa, Artificial Sequence
  Variant of branched-chain keto acid decarboxylase (kdcA) from Lactococcus lactis
MYTVGDYLLDRLHELGIEEIFGVPGDYNLQFLDQIIAHEDMKWIGNANELNASYMADGYARTKKAAAFLTTFGVGELSAINGLAGSYAENLPVVEIVGSPTSKVQNDGKFVHHTLADGDFKHFMKMHEPVTAARTLLTAENATTEIDRVLSQLLKERKPVYINLPVDVAAAKAEKPALSLEKESSTLNTTEQVILSKIEESLKNAQKPVVIAGHEVISFGLEKTVTQFVSETKLPITTLNFGKSAVDESLPSFLGIYNGKLSEISLKNFVESADFILMLGVKLTDISTGAFTHHLDENKMISLNIDEGIIFNKVVEDFDFRAVVFSLSELKGIEYEGQYIDKQYEEFIPSSAPLLQDRLWQAVESLTQSNETIVAEQGTSFFGASTIFLKSNSRFIGQPLWGSIGYTFPAALGSQIADKESRHLLFIGDGSLQLTVQELGLAIREKLNPICFIINNDGYTVEREIHGPTQSYNDIPMWNYSKLPETFGATEDRVVSKIVRTENEFVSVMKEAQADVNRMYWIELVLEKEDAPKLLKKMGKLFAEQNK

SEQ ID NO: 517 - DNA, 1641 bp, Artificial Sequence
  Variant of branched-chain keto acid decarboxylase (kdcA) from Lactococcus lactis
atgtacaccgttggcgactatctgctggaccgtctgcatgaactgggaattgaagaaatctttggcgtgccgggcgattacaatctgcaattcctggatcaaatcattgcgcatgaagatatgaaatggattggtaacgcgaatgaactgaatgcgagctacatggctgatggctatgcacgtacgaagaaggcggcggcgttcctgacgaccttcggtgttggtgaactgagcgcaatcaatgggttggcgggcagctatgcagagaacctgccagtcgtggaaatcgttgggagtccgacctcgaaggtgcagaacgatggcaagttcgttcatcacaccctggccgacggcgacttcaagcacttcaagaagatgcacgaaccggtcaccgctgcacgtacactgctgaccgccgagaacgcgaccacagagattgaccgcgtgctgagccaactgctgaaagaacgtaaacctgtgtacatcaacctgccggttgatgtcgccgcggcgaaagccgagaaaccagctctgagcctggagaaagaaagcagcacgttaaacaccacagaacaggtgatcctgtcgaagatcgaagaaagcctgaagaacgcccagaaaccggtcgtgatcgctgggcacgaggtgattagcttcggtctggagaagacggttacgcagtttgtgagtgaaaccaaactgccgattactaccctgaactttggcaaatcggctgtggatgaatccctgccgtccttcctgggtatctacaatggtaaactgagcgagattagcctcaagaactttgtggaaagcgcagacttcatcctgatgcttggtgtgaaactgacggatatcagtacgggcgcgtttacgcaccatctggacgagaacaagatgattagcctgaacattgatgaaggcatcatcttcaacaaagtcgtagaagacttcgatttccgtgcggttgttagcagcctgagcgagctgaaaggcattgaatacgaaggtcaatacattgataagcagtacgaagagttcattccgagcagcgcaccactggagcaagaccgtctgtggcaagcagtagaatctctgacacagtccaatgaaaccattgtggcggaacagggcacgtcgttcttcggtgcctccaccatcttcctgaagagcaattcacgcttcatcggtcagccgctttggggcagcatcggctatacgtttccggcagcactgggatcacagattgcggataaggaaagtcgccatctgctgttcattggtgatggtagcctgcaactgaccgtgcaggagctgggcctggcgatccgtgagaaactgaacccgatttgtttcatcatcaacaacgatggctataccgtagagcgcgagattcatgggcctacacagagctacaatgacatcccgatgtggaactatagcaaactgccggaaacctttggcgcgacggaagatcgcgtagttagcaagatcgttcgcacagagaacgagtttgtgagtgtcatgaaagaagcgcaggccgatgttaaccgcatgtattggattgaactggttctggagaaagaagatgcaccgaaactgctgaagaagatggggaagctgtttgcagaacagaacaaa

SEQ ID NO: 518 - protein, 547 aa, Artificial Sequence
  Variant of branched-chain keto acid decarboxylase (kdcA) from Lactococcus lactis
MYTVGDYLLDRLHELGIEEIFGVPGDYNLQFLDQIIAHEDMKWIGNANELNASYMADGYARTKKAAAFLTTFGVGELSAINGLAGSYAENLPVVEIVGSPTSKVQNDGKFVHHTLADGDFKHFKKMHEPVTAARTLLTAENATTEIDRVLSQLLKERKPVYINLPVDVAAAKAEKPALSLEKESSTLNTTEQVILSKIEESLKNAQKPVVIAGHEVISFGLEKTVTQFVSETKLPITTLNFGKSAVDESLPSFLGIYNGKLSEISLKNFVESADFILMLGVKLTDISTGAFTHHLDENKMISLNIDEGIIFNKVVEDFDFRAVVSSLSELKGIEYEGQYIDKQYEEFIPSSAPLEQDRLWQAVESLTQSNETIVAEQGTSFFGASTIFLKSNSRFIGQPLWGSIGYTFPAALGSQIADKESRHLLFIGDGSLQLTVQELGLAIREKLNPICFIINNDGYTVEREIHGPTQSYNDIPMWNYSKLPETFGATEDRVVSKIVRTENEFVSVMKEAQADVNRMYWIELVLEKEDAPKLLKKMGKLFAEQNK

SEQ ID NO: 519 - DNA, 1641 bp, Artificial Sequence
  Variant of branched-chain keto acid decarboxylase (kdcA) from Lactococcus lactis
atgtacaccgttggcgactatctgctggaccgtctgcatgaactgggaattgaagaaatctttggcgtgccgggcgattacaatctgcaattcctggatcaaatcattgcgcgcgaagatatgaaatggattggtaacgcgaatgaactgaatgcgagctacatggctgatggctatgcacgtacgaagaaggcggcggcgttcctgacgaccttcggtgttggtgaactgagcgcaatcaatgggttggcgggcagctatgcagagaacctgccagtcgtggaaatcgttgggagtccgacctcgaaggtgcagaacgatggcaagttcgttcatcacaccctggccgacggcgacttcaagcacttcatgaagatgcacgaaccggtcaccgctgcacgtacactgctgaccgccgagaacgcgaccacagagattgaccgcgtgctgagccaactgctgaaagaacgtaaacctgtgtacatcaacctgccggttgatgtcgccgcggcgaaagccgagaaaccagctctgagcctggagaaagaaagcagcacgttaaacaccacagaacaggtgatcctgtcgaagatcgaagaaagcctgaagaacgcccagaaaccggtcgtgatcgctgggcacgaggtgattagcttcggtctggagaagacggttacgcagtttgtgagtgaaaccaaactgccgattactaccctgaactttggcaaatcggctgtggatgaatccctgccgtccttcctgggtatctacaatggtaaactgagcgagattagcctcaagaactttgtggaaagcgcagacttcatcctgatgcttggtgtgaaactgacggatatcagtacgggcgcgtttacgcaccatctggacgagaacaagatgattagcctgaacattgatgaaggcatcatcttcaacaaagtcgtagaagacttcgatttccgtgcggttgttagcagcctgagcgagctgaaaggcattgaatacgaaggtcaatacattgataagcagtacgaagagttcattccgagcagcgcagatctgagccaagaccgtctgtggcaagcagtagaatctctgacacagtccaatgaaaccattgtggcggaacagggcacgtcgttcttcggtgcctccaccatcttcctgaagagcaattcacgcttcatcggtcagccgctttggggcagcatcggctatacgtttccggcagcactgggatcacagattgcggataaggaaagtcgccatctgctgttcattggtgatggtagcctgcaactgaccgtgcaggagctgggcctggcgatccgtgagaaactgaacccgatttgtttcatcatcaacaacgatggctataccgtagagcgcgagattcatgggcctacacagagctacaatgacatcccgatgtggaactatagcaaactgccggaaacctttggcgcgacggaagatcgcgtagttagcaagatcgttcgcacagagaacgagtttgtgagtgtcatgaaagaagcgcaggccgatgttaaccgcatgtattggattgaactggttctggagaaagaagatgcaccgaaactgctgaagaagatggggaagctgtttgcagaacagaacaaa

SEQ ID NO: 520 - protein, 547 aa, Artificial Sequence
  Variant of branched-chain keto acid decarboxylase (kdcA) from Lactococcus lactis
MYTVGDYLLDRLHELGIEEIFGVPGDYNLQFLDQIIAREDMKWIGNANELNASYMADGYARTKKAAAFLTTFGVGELSAINGLAGSYAENLPVVEIVGSPTSKVQNDGKFVHHTLADGDFKHFMKMHEPVTAARTLLTAENATTEIDRVLSQLLKERKPVYINLPVDVAAAKAEKPALSLEKESSTLNTTEQVILSKIEESLKNAQKPVVIAGHEVISFGLEKTVTQFVSETKLPITTLNFGKSAVDESLPSFLGIYNGKLSEISLKNFVESADFILMLGVKLTDISTGAFTHHLDENKMISLNIDEGIIFNKVVEDFDFRAVVSSLSELKGIEYEGQYIDKQYEEFIPSSADLSQDRLWQAVESLTQSNETIVAEQGTSFFGASTIFLKSNSRFIGQPLWGSIGYTFPAALGSQIADKESRHLLFIGDGSLQLTVQELGLAIREKLNPICFIINNDGYTVEREIHGPTQSYNDIPMWNYSKLPETFGATEDRVVSKIVRTENEFVSVMKEAQADVNRMYWIELVLEKEDAPKLLKKMGKLFAEQNK

SEQ ID NO: 521 - DNA, 1641 bp, Artificial Sequence
  Variant of branched-chain keto acid decarboxylase (kdcA) from Lactococcus lactis
atgtacaccgttggcgactatctgctggaccgtctgcatgaactgggaattgaagaaatctttggcgtgccgggcgattacaatctgcaattcctggatcaaatcattgcgcgcgaagatatgaaatggattggtaacgcgaatgaactgaatgcgagctacatggctgatggctatgcacgtacgaagaaggcggcggcgttcctgacgaccttcggtgttggtgaactgagcgcaatcaatgggttggcgggcagctatgcagagaacctgccagtcgtggaaatcgttgggagtccgacctcgaaggtgcagaacgatggcaagttcgttcatcacaccctggccgacggcgacttcaagcacttcatgaagatgcacgaaccggtcaccgctgcacgtacactgctgaccgccgagaacgcgaccacagagattgaccgcgtgctgagccaactgctgaaagaacgtaaacctgtgtacatcaacctgccggttgatgtcgccgcggcgaaagccgagaaaccagctctgagcctggagaaagaaagcagcacgttaaacaccacagaacaggtgatcctgtcgaagatcgaagaaagcctgaagaacgcccagaaaccggtcgtgatcgctgggcacgaggtgattagcttcggtctggagaagacggttacgcagtttgtgagtgaaacccttctgccgattactaccctgaactttggcaaatcggctgtggatgaatccctgccgtccttcctgggtatctacaatggtaaactgagcgagattagcctcaagaactttgtggaaagcgcagacttcatcctgatgcttggtgtgaaactgacggatatcagtacgggcgcgtttacgcaccatctggacgagaacaagatgattagcctgaacattgatgaaggcatcatcttcaacaaagtcgtagaagacttcgatttccgtgcggttgttttgagcctgagcgagctgaaaggcattgaatacgaaggtcaatacattgataagcagtacgaagagttcattccgagcagcgcacccctgagccaagaccgtctgtggcaagcagtagaatctctgacacagtccaatgaaaccattgtggcggaacagggcacgtcgttcttcggtgcctccaccatcgatctgaagagcaattcacgcttcatcggtcagccgctttggggcagcatcggctatacgtttccggcagcactgggatcacagattgcggataaggaaagtcgccatctgctgttcattggtgatggtagcctgcaactgaccgtgcaggagctgggcctggcgtggcgtgaggaactgaacccgatttgtttcatcatcaacaacgatggctataccgtagagcgcgagattcatgggcctacacagagctacaatgacatcccgatgtggaactatagcaaactgccggaaacctttggcgcgacggaagatcgcgtagttagcaagatcgttcgcacagagaacgagtttgtgagtgtcatgaaagaagcgcaggccgatgttaaccgcatgtattggattgaactggttctggagaaagaagatgcaccgaaactgctgaagaagatggggaagctgtttgcagaacagaacaaa

SEQ ID NO: 522 - protein, 547 aa, Artificial Sequence
  Variant of branched-chain keto acid decarboxylase (kdcA) from Lactococcus lactis
MYTVGDYLLDRLHELGIEEIFGVPGDYNLQFLDQIIAREDMKWIGNANELNASYMADGYARTKKAAAFLTTFGVGELSAINGLAGSYAENLPVVEIVGSPTSKVQNDGKFVHHTLADGDFKHFMKMHEPVTAARTLLTAENATTEIDRVLSQLLKERKPVYINLPVDVAAAKAEKPALSLEKESSTLNTTEQVILSKIEESLKNAQKPVVIAGHEVISFGLEKTVTQFVSETLLPITTLNFGKSAVDESLPSFLGIYNGKLSEISLKNFVESADFILMLGVKLTDISTGAFTHHLDENKMISLNIDEGIIFNKVVEDFDFRAVVLSLSELKGIEYEGQYIDKQYEEFIPSSAPLSQDRLWQAVESLTQSNETIVAEQGTSFFGASTIDLKSNSRFIGQPLWGSIGYTFPAALGSQIADKESRHLLFIGDGSLQLTVQELGLAWREELNPICFIINNDGYTVEREIHGPTQSYNDIPMWNYSKLPETFGATEDRVVSKIVRTENEFVSVMKEAQADVNRMYWIELVLEKEDAPKLLKKMGKLFAEQNK

SEQ ID NO: 523 - DNA, 1641 bp, Artificial Sequence
  Variant of branched-chain keto acid decarboxylase (kdcA) from Lactococcus lactis
atgtacaccgttggcgactatctgctggaccgtctgcatgaactgggaattgaagaaatctttggcgtgccgggcgattacaatctgcaattcctggatcaaatcattgcgcgcgaagatatgaaatggattggtaacgcgaatgaactgaatgcgagctacatggctgatggctatgcacgtacgaagaaggcggcggcgttcctgacgaccttcggtgttggtgaactgagcgcaatcaatgggttggcgggcagctatgcagagaacctgccagtcgtggaaatcgttgggagtccgacctcgaaggtgcagaacgatggcaagttcgttcatcacaccctggccgacggcgacttcaagcacttcatgaagatgcacgaaccggtcaccgctgcacgtacactgctgaccgccgagaacgcgaccacagagattgaccgcgtgctgagccaactgctgaaagaacgtaaacctgtgtacatcaacctgccggttgatgtcgccgcggcgaaagccgagaaaccagctctgagcctggagaaagaaagcagcacgttaaacaccacagaacaggtgatcctgtcgaagatcgaagaaagcctgaagaacgcccagaaaccggtcgtgatcgctgggcacgaggtgattagcttcggtctggagaagacggttacgcagtttgtgagtgaaaccaaactgccgattactaccctgaactttggcaaatcggctgtggatgaatccctgccgtccttcctgggtatctacaatggtaaactgagcgagattagcctcaagaactttgtggaaagcgcagaccagatcctgatgcttggtgttaaactgacggatatcagtacgggcgcgtttacgcaccatctggacgagaacaagatgattagcctgaacattgatgaaggcatcatcttcaacaaagtcgtagaagacttcgatttccgtgcggttgtttttagcctgagcgagctgaaaggcattgaatacgaaggtcaatacattgataagcagtacgaagagttcattccgagcagcgcaccactgagccaagaccgtctgtggcaagcagtagaatctctgacacagtccaatgaaaccattgtggcggaacagggcacgtcgttcttcggtgcctccaccatcttcctgaagagcaattcacgcttcatcggtcagccgctttggggcagcatcggctatacgtttccggcagcactgggatcacagattgcggataaggaaagtcgccatctgctgttcattggtgatggtagcctgcaactgaccgtgcaggagctgggcctggcgatacgtgaggaactgaacccgatttgtttcatcatcaacaacgatggctataccgtagagcgcgagattcatgggcctacacagagctacaatgacatcccgatgtggaactatagcaaactgccggaaacctttggcgcgacggaagatcgcgtagttagcaagatcgttcgcacagagaacgagtttgtgagtgtcatgaaagaagcgcaggccgatgttaaccgcatgtattggattgaactggttctggagaaagaagatgcaccgaaactgctgaagaagatggggaagctgtttgcagaacagaacaaa

SEQ ID NO: 524 - protein, 547 aa, Artificial Sequence
  Variant of branched-chain keto acid decarboxylase (kdcA) from Lactococcus lactis
MYTVGDYLLDRLHELGIEEIFGVPGDYNLQFLDQIIAREDMKWIGNANELNASYMADGYARTKKAAAFLTTFGVGELSAINGLAGSYAENLPVVEIVGSPTSKVQNDGKFVHHTLADGDFKHFMKMHEPVTAARTLLTAENATTEIDRVLSQLLKERKPVYINLPVDVAAAKAEKPALSLEKESSTLNTTEQVILSKIEESLKNAQKPVVIAGHEVISFGLEKTVTQFVSETKLPITTLNFGKSAVDESLPSFLGIYNGKLSEISLKNFVESADQILMLGVKLTDISTGAFTHHLDENKMISLNIDEGIIFNKVVEDFDFRAVVFSLSELKGIEYEGQYIDKQYEEFIPSSAPLSQDRLWQAVESLTQSNETIVAEQGTSFFGASTIFLKSNSRFIGQPLWGSIGYTFPAALGSQIADKESRHLLFIGDGSLQLTVQELGLAIREELNPICFIINNDGYTVEREIHGPTQSYNDIPMWNYSKLPETFGATEDRVVSKIVRTENEFVSVMKEAQADVNRMYWIELVLEKEDAPKLLKKMGKLFAEQNK

1. An engineered ketoacid decarboxylase polypeptide comprising an amino acid sequence having at least 85%, 86%, 87%, 88%, 89%, 90%, 91%, 92,%, 93%, 94%, 95%, 96%, 97%, 98%, 99%, or more sequence identity to at least one of SEQ ID NO: 2, 46, and/or 58, wherein the amino acid positions of said amino acid sequence is numbered with reference to the amino acid sequence of SEQ ID NO: 2, 46, or 58.

2. The engineered ketoacid decarboxylase polypeptide of claim 1, wherein said polypeptide sequence has at least 85%, 86%, 87%, 88%, 89%, 90%, 91%, 92%, 93%, 94%, 95%, 96%, 97%, 98%, 99%, or more sequence identity to SEQ ID NO:2, and wherein the polypeptide sequence of said engineered ketoacid decarboxylase polypeptide comprises at least one substitution or substitution set at one or more amino acid positions selected from 28, 37, 121/331, 124/442, 144/184, 153/264, 153/442, 174/453, 329, 355, 388, 419, 437, 442, 471, 500, and 510, wherein the amino acid positions are numbered with reference to SEQ ID NO: 2.

3. The engineered ketoacid decarboxylase polypeptide of claim 1, wherein said polypeptide sequence has at least 85%, 86%, 87%, 88%, 89%, 90%, 91%, 92%, 93%, 94%, 95%, 96%, 97%, 98%, 99%, or more sequence identity to SEQ ID NO: 2, and wherein the polypeptide sequence of said engineered ketoacid decarboxylase polypeptide comprises at least one substitution or substitution set at one or more amino acid positions selected from 37/144/187, 37/144/187/286/442, 37/144/442, 37/442, and 187/338/388/442, wherein the amino acid positions are numbered with reference to SEQ ID NO: 2.

4. The engineered ketoacid decarboxylase polypeptide of claim 1, wherein said polypeptide sequence has at least 85%, 86%, 87%, 88%, 89%, 90%, 91%, 92%, 93%, 94%, 95%, 96%, 97%, 98%, 99%, or more sequence identity to SEQ ID NO: 46, and wherein the polypeptide sequence of said engineered ketoacid decarboxylase polypeptide comprises at least one substitution or substitution set at one or more amino acid positions selected from 42/124/136/204/321/328/437/471/510, 42/124/136/204/437/471, 42/124/136/204/437/471/510, 42/124/136/331/437/471, 42/124/204/321/471, 42/124/204/471, 42/124/321/355/471, 42/136/204/321/328/331/355/471, 42/136/204/328/331/355/471, 42/136/328/331/471, 42/136/355/471/510, 42/204/321/328/342/355/471/510, 42/204/321/355/437/471/510, 42/204/328/342/437/471, 42/321/331/437/471, 42/321/437/471, 42/321/471, 42/328/471, 42/355/471/510, 42/471, 107/124/233/260/325/328/331/355/388/471, 107/124/233/355/446/471, 107/124/348/388/471, 107/124/471, 107/183/185/233/328/331/351/388/419/471, 107/183/233/260/328/348/351/388/471, 107/183/233/260/328/348/351/471, 107/183/233/260/331/348/351/419/471, 107/183/233/260/331/419/471, 107/183/260/328/348/351/471, 107/183/348/351/471, 107/185/233/328/351/388/471, 107/185/348/351/388/471, 107/233/260/328/331/351/471, 107/233/260/328/348/351/388/471, 107/233/348/471, 107/260/328/471, 107/325/328/348/388/471, 107/325/328/348/446/471, 107/325/331/446/471, 107/328/331/388/471, 107/328/331/471, 107/348/355/388/446/471, 107/348/388/471, 107/355/471, 107/388/471, 124/136/204/355/437/471, 124/136/321/355/471, 124/136/328/331/355/437/471/510, 124/136/331/471, 124/136/471, 124/260/331/355/446/471, 124/321/328/471/510, 124/321/331/342/471/510, 124/325/331/471, 124/325/471, 124/328/331/338/471, 124/331/338/342/355/471, 124/331/342/355/471, 124/338/342/471, 124/355/471, 136/204/328/331/355/437/471, 136/204/437/471, 136/321/471/510, 136/331/338/342/471, 136/437/471, 183/233/351/388/471, 185/233/260/328/331/419/471, 185/328/331/471, 185/471, 204/321/338/471, 233/325/328/331/348/355/471, 233/331/388/446/471, 260/325/331/446/471, 321/328/331/471, 325/328/331/348/355/388/471, 325/328/348/355/388/471, 325/331/388/471, 325/331/446/471, 328/331/355/471, 328/471, 338/342/355/471, 338/342/471, 338/342/471/510, 342/355/437/471, 342/355/471, 351/471, and 388/471, wherein the amino acid positions are numbered with reference to SEQ ID NO: 46.

5. The engineered ketoacid decarboxylase polypeptide of claim 1, wherein said polypeptide sequence has at least 85%, 86%, 87%, 88%, 89%, 90%, 91%, 92%, 93%, 94%, 95%, 96%, 97%, 98%, 99%, or more sequence identity to SEQ ID NO: 58, and wherein the polypeptide sequence of said engineered ketoacid decarboxylase polypeptide comprises at least one substitution or substitution set at one or more amino acid positions selected from 18/189/193/260/328, 179, 189, 189/203, 249, 314, 334, 346, 368, 369, 392, 507, 511, 516, 527, and 529, wherein the amino acid positions are numbered with reference to SEQ ID NO: 58.

6. The engineered ketoacid decarboxylase polypeptide of claim 1, wherein said polypeptide sequence has at least 85%, 86%, 87%, 88%, 89%, 90%, 91%, 92%, 93%, 94%, 95%, 96%, 97%, 98%, 99%, or more sequence identity to SEQ ID NO: 58, and wherein the polypeptide sequence of said engineered ketoacid decarboxylase polypeptide comprises at least one substitution or substitution set at one or more amino acid positions selected from 13/18, 189/193/342/527, 203, and 295, wherein the amino acid positions are numbered with reference to SEQ ID NO: 58.

7. The engineered ketoacid decarboxylase polypeptide of claim 1, wherein said polypeptide sequence has at least 85%, 86%, 87%, 88%, 89%, 90%, 91%, 92%, 93%, 94%, 95%, 96%, 97%, 98%, 99%, or more sequence identity to SEQ ID NO:2, and wherein the polypeptide sequence of said engineered ketoacid decarboxylase polypeptide comprises at least one substitution or substitution set at one or more amino acid positions selected from 37, 37/144/229/233/320/388, 37/144/351/352, 37/351/388, 37/388, 38, 124, 124/153/442, 124/442, 144, 144/233/388, 144/394, 151, 153/264, 153/264/275/394/442, 153/275, 153/442, 229, 231/232/275/281/442, 233, 233/350/351/355/388/394, 234, 250, 252, 252/275/442, 253, 254, 256, 262, 278, 290/541, 321, 325, 347, 348, 350, 350/351/352/355/388/394, 352, 353, 355, 388, 388/394, 441, 442, 443, 446, and 541, wherein the amino acid positions are numbered with reference to SEQ ID NO: 2.

8. The engineered ketoacid decarboxylase polypeptide of claim 1, wherein said polypeptide sequence has at least 85%, 86%, 87%, 88%, 89%, 90%, 91%, 92%, 93%, 94%, 95%, 96%, 97%, 98%, 99%, or more sequence identity to SEQ ID NO: 46, and wherein the polypeptide sequence of said engineered ketoacid decarboxylase polypeptide comprises at least one substitution or substitution set at one or more amino acid positions selected from 38/124/355, 38/229/253/256/355, 38/325/355, 38/355, 124/152/229/233/321/328/352/446, 124/152/229/233/321/350, 124/152/229/321/348/350/388/482, 124/152/254/328/350/388/446, 124/152/321/348/350/388, 124/152/388, 124/152/388/446, 124/229/256/321/325/355, 124/233/254/328/348/352/388, 124/254/328/348/350, 124/321/325/355, 124/321/348/388, 124/328, 124/328/348/350/352/388, 124/328/348/352/388, 124/328/350/352/446, 124/328/352/388, 124/348/352, 152/229/233/348/350/352, 152/254/321/348, 152/328/388/446, 229/321/446, 233/254/348, 233/325/388/443/446, 253/254/321/325/355, 275/325/446, 321/350/352/446, 328, and 353, wherein the amino acid positions are numbered with reference to SEQ ID NO: 46.

9. An engineered ketoacid decarboxylase polypeptide comprising an amino acid sequence having at least 90% sequence identity to SEQ ID NO: 2, 46, and/or 58, or a functional fragment thereof.

10. An engineered ketoacid decarboxylase polypeptide, wherein said engineered ketoacid decarboxylase polypeptide comprises an engineered polypeptide provided in claim 1.

11. The engineered ketoacid decarboxylase polypeptide of claim 10, wherein said engineered ketoacid decarboxylase polypeptide comprises an amino acid sequence having at least about 95% sequence identity to SEQ ID NO: 2, 46, and/or 58, or a functional fragment thereof.

12. The engineered ketoacid decarboxylase polypeptide of claim 1, wherein said engineered ketoacid decarboxylase polypeptide is a variant ketoacid decarboxylase polypeptide provided in any of Table 4.1, Table 4.2, Table 5.1, Table 6.1, Table 6.2, Table 7.1, and/or Table 7.2.

13. The engineered ketoacid decarboxylase polypeptide of claim 1, wherein said engineered ketoacid decarboxylase polypeptide is a Lactococcus lactis variant enzyme.

14. The engineered ketoacid decarboxylase polypeptide of claim 1, wherein said engineered ketoacid decarboxylase polypeptide is more thermostable than wild-type Lactococcus lactis ketoacid decarboxylase.

15. The engineered ketoacid decarboxylase polypeptide of claim 1, wherein said engineered ketoacid decarboxylase more resistant to proteolysis than wild-type Lactococcus lactis ketoacid decarboxylase.

16. The engineered ketoacid decarboxylase polypeptide of claim 1, wherein said engineered ketoacid decarboxylase polypeptide is less immunogenic than wild-type Lactococcus lactis ketoacid decarboxylase.

17. The engineered ketoacid decarboxylase polypeptide of claim 1, wherein said engineered ketoacid decarboxylase polypeptide is more serum stable than wild-type Lactococcus lactis ketoacid decarboxylase.

18. The engineered ketoacid decarboxylase polypeptide of claim 1, wherein said engineered ketoacid decarboxylase polypeptide comprises a sequence at least 85%, 86%, 87%, 88%, 89%, 90%, 91%, 92%, 93%, 94%, 95%, 96%, 97%, 98%, 99%, or more identical to any of the even-numbered sequences of SEQ ID NOS: 2-524.

19. The engineered ketoacid decarboxylase polypeptide of claim 18, wherein said ketoacid decarboxylase polypeptide comprises a sequence at least 90%, identical to any of the even-numbered sequences of SEQ ID NOS: 2-524.

20. The engineered ketoacid decarboxylase polypeptide of claim 18, wherein said ketoacid decarboxylase polypeptide comprises any of the even-numbered sequences of SEQ ID NOS: 2-524.

21. The engineered ketoacid decarboxylase polypeptide of claim 1, wherein said engineered ketoacid decarboxylase polypeptide is purified.

22. A composition comprising at least one engineered ketoacid decarboxylase polypeptide provided in claim 1.

23. An engineered polynucleotide sequence encoding at least one engineered ketoacid decarboxylase polypeptide of claim 1.

24. The engineered polynucleotide sequence of claim 23, wherein said polynucleotide sequence comprises a sequence at least 85%, 86%, 87%, 88%, 89%, 90%, 91%, 92%, 93%, 94%, 95%, 96%, 97%, 98%, 99%, or more identical to any of the odd-numbered sequences of SEQ ID NOS: 1-523.

25. The engineered polynucleotide sequence of claim 23, wherein said polynucleotide sequence comprises a sequence at least 90% or more identical to any of the odd-numbered sequences of SEQ ID NOS: 1-523.

26. The engineered polynucleotide sequence of claim 23, wherein said polynucleotide sequence comprises any of the odd-numbered sequences of SEQ ID NOS: 1-523.

27. The engineered polynucleotide sequence of claim 23, wherein said sequence is operably linked to a control sequence.

28. The engineered polynucleotide sequence of claim 23, wherein said polynucleotide is codon-optimized.

29. An expression vector comprising at least one engineered polynucleotide sequence of claim 23, and at least one control sequence.

30. The expression vector of claim 29, wherein said control sequence comprises a promoter.

31. The expression vector of claim 30, wherein said promoter is a heterologous promoter.

32. A host cell transformed with at least one polynucleotide sequence of claim 23.

33. The host cell of claim 32, wherein said host cell is E. coli.

34. A method of producing an engineered ketoacid decarboxylase polypeptide in a host cell comprising culturing a host cell comprising at least one expression vector set claim 29, under suitable culture conditions, such that said at least one engineered ketoacid decarboxylase polypeptide is produced.

35. A method of producing an engineered ketoacid decarboxylase polypeptide in a host cell, comprising culturing a host cell comprising at least one polynucleotide set forth in claim 23, under suitable culture conditions, such that at least one engineered ketoacid decarboxylase polypeptide is produced.

36. The method of claim 34, further comprising recovering at least one engineered ketoacid decarboxylase polypeptide from the culture and/or host cell.

37. The method of claim 34, further comprising the step of purifying said at least one engineered ketoacid decarboxylase polypeptide.

38. A composition comprising at least one engineered polynucleotide of claim 23.

39. The composition of claim 22, wherein said composition is a pharmaceutical composition.

40. The composition of claim 38, further comprising at least one pharmaceutically acceptable excipient and/or carrier.

41. The composition of claim 38, wherein said composition is suitable for the treatment of maple syrup urine disease.

42. The composition of claim 38, wherein said composition is suitable for use in gene therapy.

43. The composition of claim 38, wherein said composition is suitable for use in gene therapy to treat maple syrup urine disease, and/or elevated blood levels of isoleucine, leucine, alloioleucine and/or valine.

44. The composition of claim 38, wherein said composition is suitable for use in mRNA therapy.

45. The composition of claim 38 wherein said composition is suitable for oral administration to a human.

46. The composition of claim 38, wherein said composition is in the form of a pill, tablet, capsule, gelcap, liquid, or emulsion.

47. The composition of claim 46, wherein said pill, tablet, capsule, or gelcap further comprises an enteric coating.

48. The composition of claim 38, wherein said composition is suitable for parenteral injection into a human.

49. The composition of claim 38, wherein said composition is coadministered with at least one additional therapeutically effective compound.

50. The composition of claim 49, wherein said composition comprises at least one additional therapeutically effective compound.

51. A method for treating and/or preventing the symptoms of maple syrup urine disease in a subject, comprising providing a subject having maple syrup urine disease, and providing the composition of claim 38, to said subject.

52. The method of claim 51, wherein said symptoms of maple syrup urine disease are ameliorated.

53. The method of claim 51, wherein said subject is able to eat a diet that is less restricted in its in isoleucine, leucine, alloioleucine, and/or valine content than diets required by subjects who have not been provided at least one composition comprising at least one engineered ketoacid decarboxylase polypeptide and polynucleotide.

54. The method of claim 51, wherein said subject is able to eat a diet that is less restricted in its in isoleucine, leucine, alloioleucine, and/or valine content than diets required by subjects who have not been provided at least one composition comprising at least one engineered ketoacid decarboxylase polypeptide.

55. The method of claim 51, wherein said subject is able to eat a diet that is less restricted in its in isoleucine, leucine, alloioleucine, and/or valine content than diets required by subjects who have not been provided at least one composition comprising at least one engineered ketoacid decarboxylase polynucleotide.

56. The method of claim 51, wherein said subject is an infant, child, young adult, or adult.

57. Use of the composition provided in claim 38.
